(19) United States
(12) Patent Application Publication
(10) Pub. No.: US 2006/0275282 A1
(43) Pub. Date: Dec. 7, 2006

(54) Antibodies and Fc fusion proteins with altered immunogenicity

(75) Inventors: Gregory L. Moore, Pasadena, CA (US); Shannon Alicia Marshall, San Francisco, CA (US)

Correspondence Address: Robin M. Silva, Esq.;Dorsey & Whitney LLP, Intellectual Property Department, 555 California Street, Suite 1000, San Francisco, CA, 94104-1513, US

(73) Assignee: Xencor, Inc.

(21) Appl. No.: 11/332,619

(22) Filed: Jan. 12, 2006

Related U.S. Application Data
(60) Provisional application No. 60/643,313, filed on Jan. 12, 2005.
(60) Provisional application No. 60/652,958, filed on Feb. 14, 2005.
(60) Provisional application No. 60/654,636, filed on Feb. 17, 2005.

(51) Int. Cl. A61K 39/395; C07K 16/18

(52) U.S. Cl. 424/130.1; 530/387.1

(57) ABSTRACT

Variant antibodies and Fc fusion proteins with reduced immunogenicity are described. In particular, the variants of antibodies and Fc fusion proteins have reduced ability to bind one or more human class II MHC molecules are described.

[0001] This application claims benefit under 35 U.S.C. §119(e) to U.S. Ser. No. 60/643,313, filed Jan. 12, 2005, U.S. Ser. No. 60/652,958, filed Feb. 14, 2005, and U.S. Ser. No. 60/654,636, filed Feb. 17, 2005, which are expressly incorporated by reference in their entirety.

### FIELD OF THE INVENTION

[0002] The present invention relates to variant antibodies and Fc fusion proteins with reduced immunogenicity. In particular, variants of antibodies and Fc fusion proteins with reduced ability to bind one or more human class II MHC molecules are described.

### SEQUENCE LISTING

[0003] Pursuant to 37 C.F.R. §1.77(b)(4), reference is made to a Sequence Listing submitted on a compact disc as required by 37 C.F.R. §1.52(e)(5), which is incorporated by reference herein in its entirety. Sequences 1-1939 are provided on the compact discs, for which three are being filed herewith as Computer Readable Format Copy, Copy 1 and Copy 2.

### BACKGROUND OF THE INVENTION

[0004] Antibody Therapeutics

[0005] Monoclonal antibodies are used therapeutically for the treatment of a variety of conditions including cancer, inflammation, and cardiovascular disease. A number of features of antibodies, such as specificity for target, ability to mediate immune effector mechanisms, and long half-life in serum, make antibodies powerful therapeutics. There are currently over ten antibody products on the market and hundreds in development. In addition to antibodies, a related class of proteins that is finding an expanding role in research and therapy is the Fc fusion (Chamow et al., 1996, Trends Biotechnol 14:52-60; Ashkenazi et al., 1997, Curr Opin Immunol 9:195-200).

[0006] An Fc fusion is a protein wherein one or more polypeptides is operably linked to Fc. An Fc fusion combines the Fc region of an antibody, and thus its favorable effector functions and pharmacokinetics, with the target-binding region of a receptor, ligand, or some other protein or protein domain. The role of the latter is to mediate target recognition, and thus it is functionally analogous to the antibody variable region. Because of the structural and functional overlap of Fc fusions with antibodies, the discussion on antibodies in the present invention extends directly to Fc fusions.

[0007] Despite such widespread use, antibodies and Fc fusion proteins are not fully optimized for clinical use. One limitation is that some antibodies and Fc fusions, including antibodies with fully human sequence content, elicit unwanted immune responses.

[0008] Immunogenicity

[0009] Immunogenicity is a major barrier to the development and utilization of protein therapeutics, including antibodies and Fc fusion proteins. Several factors can contribute to protein immunogenicity, including but not limited to the protein sequence, the route and frequency of administration, and the patient population. Although immune responses are typically most severe for non-human proteins, such as murine antibodies, even therapeutics with mostly or entirely human sequence content may be immunogenic. Immunogenicity is a complex series of responses to a substance that is perceived as foreign and may include production of neutralizing and non-neutralizing antibodies, formation of immune complexes, complement activation, mast cell activation, inflammation, and anaphylaxis. Unwanted immune responses may reduce the efficacy of antibody and Fc fusion protein therapeutics by directly interfering with antigen recognition, altering interactions with effector molecules, or perturbing the serum half-life or tissue distribution of the therapeutic.

[0010] Unwanted immune responses have been observed for a number of antibodies and Fc fusion proteins. Murine antibodies including Oncoscint® (anti-TAG) and OKT3® (anti-CD3) elicited immune responses in a majority of patients. Immune responses affecting at least 5% of patients have been reported for Fc fusions and chimeric, humanized, and fully human antibodies, including Reopro® (chimeric anti-GPIIb/IIIa), Remicade® (infliximab, chimeric anti-TNF), Zenapax® (humanized anti-IL2R), (lenercept IgG-p55 TNFR fusion) and Enbrel® (etanercept, IgG1-p75 TNFR fusion) (Koren et al. (2002) Curr. Pharm. Biotechnol. 3: 349-360; Porter (2001) J. Pharm. Sci. 90: 1-11).

[0011] Because of the clinical success of monoclonal antibodies, immunogenicity reduction of these proteins has been an intense area of investigation. Antibodies are a unique system for the development of immunogenicity reduction methods because of the large number of highly conserved antibody sequences and the wealth of high-resolution structural information. A number of strategies for reducing antibody immunogenicity have been developed, such as chimerization and humanization. The central aim of all of these approaches has been the reduction of nonhuman, and correspondingly immunogenic content, while maintaining affinity for the antigen. For a description of the concepts of chimeric and humanized antibodies see Clark et al., 2000 and references cited therein (Clark, 2000, Immunol Today 21:397-402). Chimeric antibodies comprise the variable region of a nonhuman antibody, for example VH and VL domains of mouse or rat origin, operably linked to the constant region of a human antibody (see, e.g., U.S. Pat. No. 4,816,567). Humanized antibodies comprise a human framework region (FR) and one or more complementarity determining regions (CDR's) from a non-human (usually mouse or rat) antibody. The non-human antibody providing the CDR's is called the “donor” and the human immunoglobulin providing the framework is called the “acceptor”. Humanization relies principally on the grafting of donor CDRs onto acceptor (human) VL and VH frameworks (Winter U.S. Pat. No. 5,225,539). This strategy is referred to as “CDR grafting”. “Backmutation” of selected acceptor framework residues to the corresponding donor residues is often required to regain affinity that is lost in the initial grafted construct (U.S. Pat. No. 5,530,101; U.S. Pat. No. 5,585,089; U.S. Pat. No. 5,693,761; U.S. Pat. No. 5,693,762; U.S. Pat. No. 6,180,370; U.S. Pat. No. 5,859,205; U.S. Pat. No. 5,821,337; U.S. Pat. No. 6,054,297; U.S. Pat. No. 6,407,213). Methods for humanizing non-human antibodies are well known in the art, and can be essentially performed following the method of Winter and co-workers (Jones et al., 1986, Nature 321:522-525; Riechmann et al.,1988, Nature 332:323-329; Verhoeyen et al., 1988, Science, 239:1534-1536). Additional examples of humanized murine monoclonal antibodies are also known in the art, for example antibodies binding human protein C (O'Connor et al., 1998, Protein Eng 11:321-8), interleukin 2 receptor (Queen et al., 1989, Proc Natl Acad Sci, USA 86:10029-33), and human epidermal growth factor receptor 2 (Carter et al., 1992, Proc Natl Acad Sci USA 89:4285-9). A number of methods are known in the art for generating fully human antibodies, including the use of transgenic mice (Bruggemann et al., 1997, Curr Opin Biotechnol 8:455-458) or human antibody libraries coupled with selection methods (Griffiths et al., 1998, Curr Opin Biotechnol 9:102-108).

[0012] Despite the significant clinical application of antibodies engineered using these methods, these methods remain nonrobust with regard to their ability to reduce immunogenicity. A number of humanized antibodies have elicited substantial immune reaction in clinical studies, with incidences of immune response as high as 63% of patients (Ritter et al., 2001, Cancer Research 61: 6851-6859).

[0013] Several methods have been developed to modulate the immunogenicity of proteins. In some cases, PEGylation has been observed to reduce the fraction of patients who raise neutralizing antibodies by sterically blocking access to antibody agretopes (see, e.g., Hershfield et al. 1991 PNAS 88:7185-7189; Bailon. et al. 2001 Bioconjug. Chem. 12: 195-202; He et al. 1999 Life Sci. 65: 355-368). Methods that improve the solution properties of a protein therapeutic may also reduce immunogenicity, as aggregates have been observed to be more immunogenic than soluble proteins.

[0014] A more general approach to immunogenicity reduction involves mutagenesis targeted at the agretopes and epitopes in the protein sequence and structure that are most responsible for stimulating the immune system. Such agretopes and epitopes may be present even in fully human sequences. Some success has been achieved by randomly replacing solvent-exposed residues to lower binding affinity to panels of known neutralizing antibodies (see, e.g., Laroche et al. Blood 96: 1425-1432 (2000)). Due to the incredible diversity of the antibody repertoire, mutations that lower affinity to known antibodies will typically lead to production of an another set of antibodies rather than abrogation of immunogenicity. However, in some cases it may be possible to decrease surface antigenicity by replacing hydrophobic and charged residues on the protein surface with polar neutral residues (see Meyer et al. Protein Sci. 10: 491-503 (2001)).

[0015] An alternate approach is to disrupt T-cell activation. Removal of MHC-binding agretopes offers a much more tractable approach to immunogenicity reduction, as the diversity of MHC molecules comprises only ˜10³ alleles, while the antibody repertoire is estimated to be approximately 10⁸ and the T-cell receptor repertoire is larger still. By identifying and removing or modifying class II MHC-binding peptides within a protein sequence, the molecular basis of immunogenicity can be evaded. The elimination of such agretopes for the purpose of generating less immunogenic proteins has been disclosed previously; see, e.g., WO 98/52976, WO 02/079232, and WO 00/3317.

[0016] While mutations in MHC-binding agretopes can be identified that are predicted to confer reduced immunogenicity, most amino acid substitutions are energetically unfavorable. As a result, the vast majority of the reduced immunogenicity sequences identified using the methods described above will be incompatible with the structure and/or function of the protein. In order for MHC agretope removal to be a viable approach for reducing immunogenicity, it is crucial that simultaneous efforts are made to maintain a protein's structure, stability, and biological activity.

[0017] There remains a need for novel antibodies and Fc fusion proteins having reduced immunogenicity. Variants of antibodies and Fc fusion proteins with reduced immunogenicity could find use in the treatment of a number of antibody and Fc fusion protein responsive conditions.

### SUMMARY OF THE INVENTION

[0018] The present invention provides novel antibodies and Fc fusion proteins having reduced immunogenicity as compared to parent antibodies and Fc fusion proteins. In an additional aspect, the present invention is directed to methods for engineering or designing less immunogenic antibodies and Fc fusion proteins for therapeutic use.

[0019] An aspect of the present invention are antibodies and Fc fusion proteins that show decreased binding affinity for one or more class II MHC alleles relative to a parent antibody or Fc fusion protein and which significantly maintain the activity of the parent antibody or Fc fusion protein.

[0020] In a further aspect, the invention provides recombinant nucleic acids encoding the variant antibodies and Fc fusion proteins, expression vectors, and host cells.

[0021] In an additional aspect, the invention provides methods of producing a variant antibody or Fc fusion protein comprising culturing the host cells of the invention under conditions suitable for expression of the variant antibody or Fc fusion protein.

[0022] In a further aspect, the invention provides pharmaceutical compositions comprising a variant antibody or Fc fusion protein or nucleic acid encoding an antibody or Fc fusion protein of the invention and a pharmaceutical carrier.

[0023] In a further aspect, the invention provides methods for preventing or treating antibody or Fc fusion protein responsive disorders comprising administering a variant antibody or Fc fusion protein or nucleic acid encoding an antibody or Fc fusion protein of the invention to a patient.

[0024] In an additional aspect, the invention provides methods for screening the class II MHC haplotypes of potential patients in order to identify individuals who are particularly likely to raise an immune response to given antibody or Fc fusion protein therapeutics.

[0025] The present invention provides variant antibodies and Fc fusion proteins comprising amino acid sequences with at least one amino acid insertion, deletion, or substitution compared to the parent antibody or Fc fusion protein.

[0026] In one aspect, the present invention includes a non-naturally occurring protein comprising a variant Fc region having the formula:

[0027] -X(118)-X(119)-X(120)-X(121)-X(122)-X(123)-X(124)-X(125)-X(126)-X(127)-X(128)-X(129)-X(130)-X(131)-X(132)-X(133)-X(134)-X(135)-X(136)-X(137)-X(138)-X(139)-X(140)-X(141)-X(142)-X(143)-X(144)-X(145)-X(146)-X(147)-X(148)-X(149)-X(150)-X(l151)-X(152)-X(153)-X(154)-X(155)-X(156)-X(157)-X(158)-X(159)-X(160)-X(161)-X(162)-X(163)-X(164)-X(165)-X(166)-X(167)-X(168)-X(169)-X(170)-X(171)-X(172)-X(173)-X(174)-X(175)-X(176)-X(177)-X(178)-X(179)-X(180)-X(181)-X(182)-X(183)-X(184)-X(185)-X(186)-X(187)-X(188)-X(189)-X(190)-X(191)-X(192)-X(193)-X(194)-X(195)-X(196)-X(197)-X(198)-X(199)-X(200)-X(201)-X(202)-X(203)-X(204)-X(205)-X(206)-X(207)-X(208)-X(209)-X(210)-X(211)-X(212)-X(213)-X(214)-X(215)-X(216)-X(217)-X(218)-X(219)-X(220)-X(221)-X(222)-X(223)-X(224)-X(225)-X(226)-X(227)-X(228)-X(229)-X(230)-X(231)-X(232)-X(233)-X(234)-X(235)-X(236)-X(237)-X(238)-X(239)-X(240)-X(241)-X(242)-X(243)-X(244)-X(245)-X(246)-X(247)-X(248)-X(249)-X(250)-X(251)-X(252)-X(253)-X(254)-X(255)-X(256)-X(257)-X(258)-X(259)-X(260)-X(261)-X(262)-X(263)-X(264)-X(265)-X(266)-X(267)-X(268)-X(269)-X(270)-X(271)-X(272)-X(273)-X(274)-X(275)-X(276)-X(277)-X(278)-X(279)-X(280)-X(281)-X(282)-X(283)-X(284)-X(285)-X(286)-X(287)-X(288)-X(289)-X(290)-X(291)-X(292)-X(293)-X(294)-X(295)-X(296)-X(297)-X(298)-X(299)-X(300)-X(301)-X(302)-X(303)-X(304)-X(305)-X(306)-X(307)-X(308)-X(309)-X(310)-X(311)-X(312)-X(313)-X(314)-X(315)-X(316)-X(317)-X(318)-X(319)-X(320)-X(321)-X(322)-X(323)-X(324)-X(325)-X(326)-X(327)-X(328)-X(329)-X(330)-X(331)-X(332)-X(333)-X(334)-X(335)-X(336)-X(337)-X(338)-X(339)-X(340)-X(341)-X(342)-X(343)-X(344)-X(345)-X(346)-X(347)-X(348)-X(349)-X(350)-X(351)-X(352)-X(353)-X(354)-X(355)-X(356)-X(357)-X(358)-X(359)-X(360)-X(361)-X(362)-X(363)-X(364)-X(365)-X(366)-X(367)-X(368)-X(369)-X(370)-X(371)-X(372)-X(373)-X(374)-X(375)-X(376)-X(377)-X(378)-X(379)-X(380)-X(381)-X(382)-X(383)-X(384)-X(385)-X(386)-X(387)-X(388)-X(389)-X(390)-X(391)-X(392)-X(393)-X(394)-X(395)-X(396)-X(397)-X(398)-X(399)-X(400)-X(401)-X(402)-X(403)-X(404)-X(405)-X(406)-X(407)-X(408)-X(409)-X(410)-X(411)-X(412)-X(413)-X(414)-X(415)-X(416)-X(417)-X(418)-X(419)-X(420)-X(421)-X(422)-X(423)-X(424)-X(425)-X(426)-X(427)-X(428)-X(429)-X(430)-X(431)-X(432)-X(433)-X(434)-X(435)-X(436)-X(437)-X(438)-X(439)-X(440)-X(441)-X(442)-X(443)-X(444)-X(445)-X(446)-X(447)-;

[0028] wherein X(118) is A; X(119) is S; X(120) is T; X(121) is K; X(122) is G; X(123) is P; X(124) is S; X(125) is V; X(126) is F; X(127) is P; X(128) is L; X(129) is A; X(130) is P; X(131) is S; X(132) is S; X(133) is K; X(134) is S; X(135) is T; X(136) is S; X(137) is G; X(138) is G; X(139) is T; X(140) is A; X(141) is A; X(142) is L; X(143) is G; X(144) is C; X(145) is L; X(146) is V; X(147) is K; X(148) is D; X(149) is Y; X(150) is F; X(151) is P; X(152) is E; X(153) is P; X(154) is V; X(155) is T; X(156) is V; X(157) is S; X(158) is W; X(159) is N; X(160) is S; X(161) is G; X(162) is A; X(163) is L; X(164) is T; X(165) is S; X(166) is G; X(167) is V; X(168) is H; X(169) is T; X(170) is F; X(171) is P; X(172) is A; X(173) is V; X(174) is L; X(175) is Q; X(176) is S; X(177) is S; X(178) is G; X(179) is L; X(180) is Y; X(181) is S; X(182) is L; X(183) is S; X(184) is S; X(185) is V; X(186) is V; X(187) is T; X(188) is V; X(189) is P; X(190) is S; X(191) is S; X(192) is S; X(193) is L; X(194) is G; X(195) is T; X(196) is Q; X(197) is T; X(198) is Y; X(199) is I; X(200) is C; X(201) is N; X(202) is V; X(203) is N; X(204) is H; X(205) is K; X(206) is P; X(207) is S; X(208) is N; X(209) is T; X(210) is K; X(211) is V; X(212) is D; X(213) is K; X(214) is K; X(215) is V; X(216) is E; X(217) is P; X(218) is K; X(219) is S; X(220) is C; X(221) is D; X(222) is K; X(223) is T; X(224) is H; X(225) is T; X(226) is C; X(227) is P; X(228) is P; X(229) is C; X(230) is P; X(231) is A; X(232) is P; X(233) is E; X(234) is L; X(235) is L; X(236) is G; X(237) is G; X(238) is P; X(239) is S; X(240) is V; X(241) is F; X(242) is L; X(243) is F; X(244) is P; X(245) is P; X(246) is K; X(247) is P; X(248) is K; X(249) is D; X(250) is T; X(251) is selected from the group consisting of L, D, E, H, and T; X(252) is selected from the group consisting of M, D, E, and H; X(253) is selected from the group consisting of I, D, E, F, H, K, L, N, P, Q, R, S, T, V, W, and Y; X(254) is selected from the group consisting of S, E, K, N, P, Q, R, V, and W; X(255) is R; X(256) is selected from the group consisting of T, I, L, M, P, S, V, W, and Y; X(257) is P; X(258) is E; X(259) is selected from the group consisting of V and T; X(260) is T; X(261) is C; X(262) is V; X(263) is V; X(264) is V; X(265) is D; X(266) is V; X(267) is S; X(268) is H; X(269) is E; X(270) is D; X(271) is P; X(272) is E; X(273) is V; X(274) is K; X(275) is F; X(276) is N; X(277) is W; X(278) is selected from the group consisting of Y, D and E; X(279) is selected from the group consisting of V, A, Q, and T; X(280) is D; X(281) is G; X(282) is selected from the group consisting of V, F, I, L, P, Q, W, and Y; X(283) is E; X(284) is V; X(285) is selected from the group consisting of H, E, P, and T; X(286) is N; X(287) is A; X(288) is K; X(289) is T; X(290) is K; X(291) is P; X(292) is R; X(293) is E; X(294) is E; X(295) is Q; X(296) is Y; X(297) is N; X(298) is S; X(299) is T; X(300) is Y, X(301) is selected from the group consisting of R, G, K, and Q; X(302) is selected from the group consisting of D, E, H, K, Q, S, and T; X(303) is selected from the group consisting of V, N, P, Q, R, and S; X(304) is S; X(305) is selected from the group consisting of V, G, P, and T; X(306) is selected from the group consisting of L, F, H, I, N, T, V, and Y; X(307) is T; X(308) is selected from the group consisting of V, A, N, P, and S; X(309) is selected from the group consisting of L, F, G, I, M, N, Q, S, T, V, W, and Y; X(310) is H; X(311) is selected from the group consisting of Q, D, E, G, P, T, and W; X(312) is D; X(313) is W; X(314) is L; X(315) is N; X(316) is G; X(317) is K; X(318) is E; X(319) is Y; X(320) is K; X(321) is C; X(322) is K; X(323) is V; X(324) is S; X(325) is N; X(326) is K; X(327) is A; X(328) is L; X(329) is P; X(330) is A; X(331) is P; X(332) is l; X(333) is E; X(334) is K; X(335) is T; X(336) is l; X(337) is S; X(338) is K; X(339) is A; X(340) is K; X(341) is G; X(342) is Q; X(343) is P; X(344) is R; X(345) is E; X(346) is P; X(347) is Q; X(348) is V; X(349) is Y; X(350) is T; X(351) is L; X(352) is P; X(353) is P; X(354) is S; X(355) is R; X(356) is D; X(357) is E; X(358) is L; X(359) is T; X(360) is K; X(361) is N; X(362) is Q; X(363) is V; X(364) is S; X(365) is L; X(366) is T; X(367) is C; X(368) is L; X(369) is V; X(370) is K; X(371) is G; X(372) is F; X(373) is Y; X(374) is P; X(375) is S; X(376) is D; X(377) is I; X(378) is A; X(379) is V; X(380) is E; X(381) is W; X(382) is E; X(383) is S; X(384) is N; X(385) is G; X(386) is Q; X(387) is P; X(388) is E; X(389) is N; X(390) is N; X(391) is Y; X(392) is K; X(393) is T; X(394) is T; X(395) is P; X(396) is P; X(397) is V; X(398) is L; X(399) is D; X(400) is S; X(401) is D; X(402) is G; X(403) is S; X(404) is selected from the group consisting of F, H, I, L, M, N, Q, T, and V; X(405) is selected from the group consisting of F and W; X(406) is selected from the group consisting of L, A, D, E, G, K, N, Q, S, T, and V; X(407) is selected from the group consisting of Y and H; X(408) is S; X(409) is K; X(410) is selected from the group consisting of L, I and Q; X(411) is T; X(412) is selected from the group consisting of V and P; X(413) is D; X(414) is K; X(415) is S; X(416) is R; X(417) is W; X(418) is Q; X(419) is Q; X(420) is G; X(421) is N; X(422) is V; X(423) is F; X(424) is S; X(425) is C; X(426) is S; X(427) is V; X(428) is M; X(429) is H; X(430) is E; X(431) is A; X(432) is selected from the group consisting of L, E and K; X(433) is selected from the group consisting of H, D, G, P, S, T, and W; X(434) is selected from the group consisting of N, D, E, G, H, S, T, and W; X(435) is selected from the group consisting of H, G, K, M, N, P, S, T, and V; X(436) is Y; X(437) is selected from the group consisting of T, D, E, G, H, K, N, Q, and S; X(438) is selected from the group consisting of Q, G, P, S, and T; and, X(439) is K; X(440) is selected from the group consisting of S, D, E, G, H, K, N, P, Q, R, and T, X(441) is L; X(442) is S; X(443) is L; X(444) is S; X(445) is P; X(446) is G; X(447) is K. The non-naturally occurring protein has a reduced immunogenicity as compared with SEQ ID NO:1.

[0029] In another aspect, the present invention is directed to a non-naturally occurring protein comprising a variant Fc region comprising at least one amino acid modification of a naturally occurring protein sequence selected from the group consisting of SEQ ID NO:1, the modification at a position selected from the group consisting of positions 251, 252, 253, 254, 256, 259, 278, 279, 282, 285, 301, 302, 303, 305, 306, 308, 309, 311, 404, 405, 406, 407, 410, 412, 432, 433, 434, 435, 437, 438, and 440, wherein the modification at position 251 is selected from the group consisting of D, E, H, and T; wherein the modification at position 252 is selected from the group consisting of D, E, and H; wherein the modification at position 253 is selected from the group consisting of D, E, F, H, K, L, N, P, Q, R, S, T, V, W, and Y; wherein the modification at position 254 is selected from the group consisting of E, K, N, P, Q, R, V, and W; wherein the modification at position 256 is selected from the group consisting of I, L, M, P, S, V, W, and Y; wherein the modification at position 259 is T; wherein the modification at position 278 is selected from the group consisting of D and E; wherein the modification at position 279 is selected from the group consisting of A, Q, and T; wherein the modification at position 282 is selected from the group consisting of F, I, L, P, Q, W, and Y; wherein the modification at position 285 is selected from the group consisting of P and T; wherein the modification at position 301 is selected from the group consisting of G, K, and Q; wherein the modification at position 302 is selected from the group consisting of A, D, E, H, K, Q, S, and T; wherein the modification at position 303 is selected from the group consisting of N, P, Q, R, and S; wherein the modification at position 305 is selected from the group consisting of G, P, and T; wherein the modification at position 306 is selected from the group consisting of F, H, I, N, T, V, and Y; wherein the modification at position 308 is selected from the group consisting of A, N, P, and S; wherein the modification at position 309 is selected from the group consisting of F, G, I, M, N, Q, S, T, V, W, and Y; wherein the modification at position 311 is selected from the group consisting of D, E, G, P, T, and W; wherein the modification at position 404 is selected from the group consisting of H, I, L, M, N, Q, T, and V; wherein the modification at position 405 is W; wherein the modification at position 406 is selected from the group consisting of A, D, E, G, K, N, Q, S, T, and V; wherein the modification at position 407 is H; wherein the modification at position 410 is selected from the group consisting of I and Q; wherein the modification at position 412 is P; wherein the modification at position 432 is selected from the group consisting of E and K; wherein the modification at position 433 is selected from the group consisting of D, G, P, S, T, and W; wherein the modification at position 434 is selected from the group consisting of D, E, G, H, S, T, and W; wherein the modification at position 435 is selected from the group consisting of G, K, M, N, P, S, T, and V; wherein the modification at position 437 is selected from the group consisting of D, E, G, H, K, N, Q, and S; wherein the modification at position 438 is selected from the group consisting of G, P, S, and T; and, wherein the modification at position 440 is selected from the group consisting of D, E, G, H, K, N, P, Q, R, and T. The non-naturally occurring protein has reduced immunogenicity as compared with a protein comprising a naturally-occurring Fc region of SEQ ID NO:1.

[0030] In another variation, the variant protein the modification is made to an amino acid in one of the following agretopes: Agretope 1 (125-133), Agretope 2 (126-134), Agretope 3 (128-136), Agretope 4 (145-153), Agretope 5 (149-157), Agretope 6 (167-175), Agretope 7 (174-182), Agretope 8 (179-187), Agretope 9 (180-188), Agretope 10 (182-190), Agretope 11a (185-193), Agretope 12 (202-210), Agretope 15 (240-248), Agretope 16 (251-259), Agretope 17a (262-270), Agretope 18 (277-285), Agretope 19a (300-308), Agretope 20a (302-310), Agretope 21a (303-311), Agretope 23 (369-377), Agretope 24a (404-412), Agretope 25a (406-414), Agretope 27a (422-430), and Agretope 28a (432-440). Alternatively, the variant protein the modification is made to an amino acid in one of the following agretopes: Agretope 16 (251-259), Agretope 17a (262-270), Agretope 18 (277-285), Agretope 19a (300-308), Agretope 20a (302-310), Agretope 21 a (303-311), Agretope 23 (369-377), Agretope 24a (404-412), Agretope 25a (406-414), Agretope 27a (422-430), and Agretope 28a (432-440).

[0031] In a further variation, the modification at position 251 is selected from the group consisting of D, E, H, and T; wherein the modification at position 252 is D; the modification at position 253 is selected from the group consisting of D and E; the modification at position 256 is selected from the group consisting of M, W, and Y; the modification at position 278 is D; the modification at position 282 is selected from the group consisting of F, L, Q, W, and Y; the modification at position 303 is selected from the group consisting of N, P, Q, R, and S; the modification at position 311 is D; the modification at position 404 is selected from the group consisting of H, N, Q, and T; the modification at position 432 is selected from the group consisting of E and K; and, the modification at position 437 is E.

[0032] In another variation, the variant protein the modification is made to an amino acid in an agretope Agretope 4 (145-153), Agretope 5 (149-157), Agretope 6 (167-175), Agretope 7 (174-182), Agretope 8 (179-187), Agretope 9 (180-188), Agretope 10 (182-190), Agretope 11b (185-193), Agretope 15 (240-248), Agretope 16 (251-259), Agretope 17a (262-270), Agretope 18 (277-285), Agretope 19b (300-308), Agretope 20b (302-310), Agretope 21b (303-311), Agretope 22a (348-356), Agretope 23 (369-377), Agretope 24a (404-412), Agretope 25a (406-414), Agretope 27a (422-430), and Agretope 28a (432-440).

[0033] In another aspect, the present invention is directed to a non-naturally occurring protein comprising a variant Fc region having the formula:

[0034] -X(118)-X(119)-X(120)-X(121)-X(122)-X(123)-X(124)-X(125)-X(126)-X(127)-X(128)-X(129)-X(130)-X(131)-X(132)-X(133)-X(134)-X(135)-X(136)-X(137)-X(138)-X(139)-X(140)-X(141)-X(142)-X(143)-X(144)-X(145)-X(146)-X(147)-X(148)-X(149)-X(150)-X(151)-X(152)-X(153)-X(154)-X(155)-X(156)-X(157)-X(158)-X(159)-X(160)-X(161)-X(162)-X(163)-X(164)-X(165)-X(166)-X(167)-X(168)-X(169)-X(170)-X(171)-X(172)-X(173)-X(174)-X(175)-X(176)-X(177)-X(178)-X(179)-X(180)-X(181)-X(182)-X(183)-X(184)-X(185)-X(186)-X(187)-X(188)-X(189)-X(190)-X(191)-X(192)-X(193)-X(194)-X(195)-X(196)-X(197)-X(198)-X(199)-X(200)-X(201)-X(202)-X(203)-X(204)-X(205)-X(206)-X(207)-X(208)-X(209)-X(210)-X(211)-X(212)-X(213)-X(214)-X(215)-X(216)-X(217)-X(218)-X(219)-X(220)-X(221)-X(222)-X(223)-X(224)-X(225)-X(226)-X(227)-X(228)-X(229)-X(230)-X(231)-X(232)-X(233)-X(234)-X(235)-X(236)-X(237)-X(238)-X(239)-X(240)-X(241)-X(242)-X(243)-X(244)-X(245)-X(246)-X(247)-X(248)-X(249)-X(250)-X(251)-X(252)-X(253)-X(254)-X(255)-X(256)-X(257)-X(258)-X(259)-X(260)-X(261)-X(262)-X(263)-X(264)-X(265)-X(266)-X(267)-X(268)-X(269)-X(270)-X(271)-X(272)-X(273)-X(274)-X(275)-X(276)-X(277)-X(278)-X(279)-X(280)-X(281)-X(282)-X(283)-X(284)-X(285)-X(286)-X(287)-X(288)-X(289)-X(290)-X(291)-X(292)-X(293)-X(294)-X(295)-X(296)-X(297)-X(298)-X(299)-X(300)-X(301)-X(302)-X(303)-X(304)-X(305)-X(306)-X(307)-X(308)-X(309)-X(310)-X(311)-X(312)-X(313)-X(314)-X(315)-X(316)-X(317)-X(318)-X(319)-X(320)-X(321)-X(322)-X(323)-X(324)-X(325)-X(326)-X(327)-X(328)-X(329)-X(330)-X(331)-X(332)-X(333)-X(334)-X(335)-X(336)-X(337)-X(338)-X(339)-X(340)-X(341)-X(342)-X(343)-X(344)-X(345)-X(346)-X(347)-X(348)-X(349)-X(350)-X(351)-X(352)-X(353)-X(354)-X(355)-X(356)-X(357)-X(358)-X(359)-X(360)-X(361)-X(362)-X(363)-X(364)-X(365)-X(366)-X(367)-X(368)-X(369)-X(370)-X(371)-X(372)-X(373)-X(374)-X(375)-X(376)-X(377)-X(378)-X(379)-X(380)-X(381)-X(382)-X(383)-X(384)-X(385)-X(386)-X(387)-X(388)-X(389)-X(390)-X(391)-X(392)-X(393)-X(394)-X(395)-X(396)-X(397)-X(398)-X(399)-X(400)-X(401)-X(402)-X(403)-X(404)-X(405)-X(406)-X(407)-X(408)-X(409)-X(410)-X(411)-X(412)-X(413)-X(414)-X(415)-X(416)-X(417)-X(418)-X(419)-X(420)-X(421)-X(422)-X(423)-X(424)-X(425)-X(426)-X(427)-X(428)-X(429)-X(430)-X(431)-X(432)-X(433)-X(434)-X(435)-X(436)-X(437)-X(438)-X(439)-X(440)-X(441)-X(442)-X(443)-X(444)-X(445)-X(446)-X(447)-; X(118) is A; X(119) is S; X(120) is T; X(121) is K; X(122) is G; X(123) is P; X(124) is S; X(125) is V; X(126) is F; X(127) is P; X(128) is L; X(129) is A; X(130) is P; X(131) is C; X(132) is S; X(133) is R; X(134) is S; X(135) is T; X(136) is S; X(137) is E; X(138) is S; X(139) is T; X(140) is A; X(141) is A; X(142) is L; X(143) is G; X(144) is C; X(145) is L; X(146) is V; X(147) is K; X(148) is D; X(149) is Y; X(150) is F; X(151) is P; X(152) is E; X(153) is P; X(154) is V; X(155) is T; X(156) is V; X(157) is S; X(158) is W; X(159) is N; X(160) is S; X(161) is G; X(162) is A; X(163) is L; X(164) is T; X(165) is S; X(166) is G; X(167) is V; X(168) is H; X(169) is T; X(170) is F; X(171) is P; X(172) is A; X(173) is V; X(174) is L; X(175) is Q; X(176) is S; X(177) is S; X(178) is G; X(179) is L; X(180) is Y; X(181) is S; X(182) is L; X(183) is S; X(184) is S; X(185) is V; X(186) is V; X(187) is T; X(188) is V; X(189) is P; X(190) is S; X(191) is S; X(192) is N; X(193) is F; X(194) is G; X(195) is T; X(196) is Q; X(197) is T; X(198) is Y; X(199) is T; X(200) is C; X(201) is N; X(202) is V; X(203) is D; X(204) is H; X(205) is K; X(206) is P; X(207) is S; X(208) is N; X(209) is T; X(210) is K; X(211) is V; X(212) is D; X(213) is K; X(214) is T; X(215) is V; X(216) is E; X(217) is R; X(218) is K; X(219) is C; X(220) is C; X(221) is a bond; X(222) is V; X(223) is a bond; X(224) is E; X(225) is a bond; X(226) is C; X(227) is P; X(228) is P; X(229) is C; X(230) is P; X(231) is A; X(232) is P; X(233) is P; X(234) is V; X(235) is A; X(236) is a bond; X(237) is G; X(238) is P; X(239) is S; X(240) is V; X(241) is F; X(242) is L; X(243) is F; X(244) is P; X(245) is P; X(246) is K; X(247) is P; X(248) is K; X(249) is D; X(250) is T; X(251) is selected from the group consisting of L, D, E, H, and T; X(252) is selected from the group consisting of M, D, E, and H; X(253) is selected from the group consisting of I, D, E, F, H, K, L, N, P, Q, R, S, T, V, W, and Y; X(254) is selected from the group consisting of S, E, K, N, P, Q, R, V, and W; X(255) is R; X(256) is selected from the group consisting of T, I, L, M, P, S, V, W, and Y; X(257) is P; X(258) is E; X(259) is selected from the group consisting of V and T; X(260) is T; X(261) is C; X(262) is V; X(263) is V; X(264) is V; X(265) is D; X(266) is V; X(267) is S; X(268) is H; X(269) is E; X(270) is D; X(271) is P; X(272) is E; X(273) is V; X(274) is Q; X(275) is F; X(276) is N; X(277) is W; X(278) is selected from the group consisting of Y, D and E; X(279) is selected from the group consisting of V, A, Q, and T; X(280) is D; X(281) is G; X(282) is selected from the group consisting of V, F, I, L, Q, and W; X(283) is E; X(284) is V; X(285) is selected from the group consisting of H, P, and T; X(286) is N; X(287) is A; X(288) is K; X(289) is T; X(290) is K; X(291) is P; X(292) is R; X(293) is E; X(294) is E; X(295) is Q; X(296) is F; X(297) is N; X(298) is S; X(299) is T; X(300) is F; X(301) is selected from the group consisting of R, G, K, and Q; X(302) is selected from the group consisting of V, A, D, E, H, K, P, Q, S, and T; X(303) is selected from the group consisting of V, N, P, and Q; X(304) is S; X(305) is selected from the group consisting of V, G and P; X(306) is selected from the group consisting of L, I, N, T, V, and Y; X(307) is T; X(308) is V; X(309) is V; X(310) is H; X(311) is Q; X(312) is D; X(313) is W; X(314) is L; X(315) is N; X(316) is G; X(317) is K; X(318) is E; X(319) is Y; X(320) is K; X(321) is C; X(322) is K; X(323) is V; X(324) is S; X(325) is N; X(326) is K; X(327) is G; X(328) is L; X(329) is P; X(330) is A; X(331) is P; X(332) is I; X(333) is E; X(334) is K; X(335) is T; X(336) is l; X(337) is S; X(338) is K; X(339) is T; X(340) is K; X(341) is G; X(342) is Q; X(343) is P; X(344) is R; X(345) is E; X(346) is P; X(347) is Q; X(348) is V; X(349) is Y; X(350) is T; X(351) is L; X(352) is P; X(353) is P; X(354) is S; X(355) is R; X(356) is E; X(357) is E; X(358) is M; X(359) is T; X(360) is K; X(361) is N; X(362) is Q; X(363) is V; X(364) is S; X(365) is L; X(366) is T; X(367) is C; X(368) is L; X(369) is V; X(370) is K; X(371) is G; X(372) is F; X(373) is Y; X(374) is P; X(375) is S; X(376) is D; X(377) is I; X(378) is A; X(379) is V; X(380) is E; X(381) is W; X(382) is E; X(383) is S; X(384) is N; X(385) is G; X(386) is Q; X(387) is P; X(388) is E; X(389) is N; X(390) is N; X(391) is Y; X(392) is K; X(393) is T; X(394) is T; X(395) is P; X(396) is P; X(397) is M; X(398) is L; X(399) is D; X(400) is S; X(401) is D; X(402) is G; X(403) is S; X(404) is selected from the group consisting of F, H, L, M, and N; X(405) is selected from the group consisting of F, D, E, T, and W; X(406) is selected from the group consisting of L, A, D, E, G, K, N, Q, S, T, and V; X(407) is selected from the group consisting of Y and H; X(408) is S; X(409) is K; X(410) is selected from the group consisting of L, I, K, and Q; X(411) is T; X(412) is selected from the group consisting of V and P; X(413) is D; X(414) is K; X(415) is S; X(416) is R; X(417) is W; X(418) is Q; X(419) is Q; X(420) is G; X(421) is N; X(422) is V; X(423) is F; X(424) is S; X(425) is C; X(426) is S; X(427) is V; X(428) is M; X(429) is H; X(430) is E; X(431) is A; X(432) is selected from the group consisting of L, E and K; X(433) is selected from the group consisting of H, D, G, P, S, T, and W; X(434) is selected from the group consisting of N, D, E, G, H, S, T, and W; X(435) is selected from the group consisting of H, G, K, M, N, P, S, T, and V; X(436) is Y; X(437) is selected from the group consisting of T, D, E, G, H, K, N, Q, and S; X(438) is selected from the group consisting of Q, G, P, S, and T; and X(439) is K; X(440) is selected from the group consisting of S, D, E, G, H, K, N, P, Q, R, and T; X(441) is L; X(442) is S; X(443) is L; X(444) is S; X(445) is P; X(446) is G; and X(447) is K. The non-naturally occurring protein has reduced immunogenicity as compared with a protein comprising SEQ ID NO:2.

[0035] In a further aspect, the present invention is directed to a non-naturally occurring protein comprising a variant Fc region comprising at least one amino acid modification of SEQ ID NO:2, the modification at a position selected from the group consisting of positions 251, 252, 253, 254, 256, 259, 278, 279, 282, 285, 301, 302, 303, 305, 306, 404, 405, 406, 407, 410, 412, 432, 433, 434, 435, 437, 438, and 440. The modification at position 251 is selected from the group consisting of D, E, H, and T; the modification at position 252 is selected from the group consisting of D, E, and H; the modification at position 253 is selected from the group consisting of D, E, F, H, K, L, N, P, Q, R, S, T, V, W, and Y; the modification at position 254 is selected from the group consisting of E, K, N, P, Q, R, V, and W; the modification at position 256 is selected from the group consisting of I, L, M, P, S, V, W, and Y; the modification at position 259 is T; the modification at position 278 is selected from the group consisting of D and E; the modification at position 279 is selected from the group consisting of A, Q, and T; the modification at position 282 is selected from the group consisting of F, I, L, Q, and W; the modification at position 285 is selected from the group consisting of P and T; the modification at position 301 is selected from the group consisting of G, K, and Q; the modification at position 302 is selected from the group consisting of A, D, E, H, K, P, Q, S, and T; the modification at position 303 is selected from the group consisting of N, P, and Q; the modification at position 305 is selected from the group consisting of G and P; the modification at position 306 is selected from the group consisting of I, N, T, V, and Y; the modification at position 404 is selected from the group consisting of H, L, M, and N; the modification at position 405 is selected from the group consisting of D, E, T, and W; the modification at position 406 is selected from the group consisting of A, D, E, G, K, N, Q, S, T, and V; the modification at position 407 is H; the modification at position 410 is selected from the group consisting of I, K, and Q; the modification at position 412 is P; the modification at position 432 is selected from the group consisting of E and K; the modification at position 433 is selected from the group consisting of D, G, P, S, T, and W; the modification at position 434 is selected from the group consisting of D, E, G, H, S, T, and W; the modification at position 435 is selected from the group consisting of G, K, M, N, P, S, T, and V; the modification at position 437 is selected from the group consisting of D, E, G, H, K, N, Q, and S; the modification at position 438 is selected from the group consisting of G, P, S, and T; and, the modification at position 440 is selected from the group consisting of D, E, G, H, K, N, P, Q, R, and T, the non-naturally occurring protein having reduced immunogenicity as compared with a protein comprising a naturally-occurring Fc region.

[0036] In a further variation, at least one modification is made to the group consisting of positions 251, 252, 253, 254, 256, 259, 278, 279, 282, 285, 302, 303, 305, 306, 404, 405, 406, 407, 410, 412, 432, 433, 434, 435, 437, 438, and 440. The modification at position 251 is selected from the group consisting of D, E, H, and T; the modification at position 252 is D; the modification at position 253 is selected from the group consisting of D and E; the modification at position 256 is selected from the group consisting of M, W, and Y; the modification at position 278 is D; the modification at position 282 is selected from the group consisting of F, L, Q, and W; the modification at position 404 is selected from the group consisting of H and N; the modification at position 432 is selected from the group consisting of E and K; and, the modification at position 437 is E.

[0037] In a further aspect, the present invention is directed to a non-naturally occurring protein comprising a variant Fc region having the formula:

[0038] -X(118)-X(119)-X(120)-X(121)-X(122)-X(123)-X(124)-X(125)-X(126)-X(127)-X(128)-X(129)-X(130)-X(131)-X(132)-X(133)-X(134)-X(135)-X(136)-X(137)-X(138)-X(139)-X(140)-X(141)-X(142)-X(143)-X(144)-X(145)-X(146)-X(147)-X(148)-X(149)-X(150)-X(151)-X(152)-X(153)-X(154)-X(155)-X(156)-X(157)-X(158)-X(159)-X(160)-X(161)-X(162)-X(163)-X(164)-X(165)-X(166)-X(167)-X(168)-X(169)-X(170)-X(171)-X(172)-X(173)-X(174)-X(175)-X(176)-X(177)-X(178)-X(179)-X(180)-X(181)-X(182)-X(183)-X(184)-X(185)-X(186)-X(187)-X(188)-X(189)-X(190)-X(191)-X(192)-X(193)-X(194)-X(195)-X(196)-X(197)-X(198)-X(199)-X(200)-X(201)-X(202)-X(203)-X(204)-X(205)-X(206)-X(207)-X(208)-X(209)-X(210)-X(211)-X(212)-X(213)-X(214)-X(215)-X(216)-X(217)-X(218)-X(219)-X(220)-X(221)-X(222)-X(223)-X(224)-X(225)-X(226)-X(227)-X(228)-X(229)-X(230)-X(231)-X(232)-X(233)-X(234)-X(235)-X(236)-X(237)-X(238)-X(239)-X(240)-X(241)-X(242)-X(243)-X(244)-X(245)-X(246)-X(247)-X(248)-X(249)-X(250)-X(251)-X(252)-X(253)-X(254)-X(255)-X(256)-X(257)-X(258)-X(259)-X(260)-X(261)-X(262)-X(263)-X(264)-X(265)-X(266)-X(267)-X(268)-X(269)-X(270)-X(271)-X(272)-X(273)-X(274)-X(275)-X(276)-X(277)-X(278)-X(279)-X(280)-X(281)-X(282)-X(283)-X(284)-X(285)-X(286)-X(287)-X(288)-X(289)-X(290)-X(291)-X(292)-X(293)-X(294)-X(295)-X(296)-X(297)-X(298)-X(299)-X(300)-X(301)-X(302)-X(303)-X(304)-X(305)-X(306)-X(307)-X(308)-X(309)-X(310)-X(311)-X(312)-X(313)-X(314)-X(315)-X(316)-X(317)-X(318)-X(319)-X(320)-X(321)-X(322)-X(323)-X(324)-X(325)-X(326)-X(327)-X(328)-X(329)-X(330)-X(331)-X(332)-X(333)-X(334)-X(335)-X(336)-X(337)-X(338)-X(339)-X(340)-X(341)-X(342)-X(343)-X(344)-X(345)-X(346)-X(347)-X(348)-X(349)-X(350)-X(351)-X(352)-X(353)-X(354)-X(355)-X(356)-X(357)-X(358)-X(359)-X(360)-X(361)-X(362)-X(363)-X(364)-X(365)-X(366)-X(367)-X(368)-X(369)-X(370)-X(371)-X(372)-X(373)-X(374)-X(375)-X(376)-X(377)-X(378)-X(379)-X(380)-X(381)-X(382)-X(383)-X(384)-X(385)-X(386)-X(387)-X(388)-X(389)-X(390)-X(391)-X(392)-X(393)-X(394)-X(395)-X(396)-X(397)-X(398)-X(399)-X(400)-X(401)-X(402)-X(403)-X(404)-X(405)-X(406)-X(407)-X(408)-X(409)-X(410)-X(411)-X(412)-X(413)-X(414)-X(415)-X(416)-X(417)-X(418)-X(419)-X(420)-X(421)-X(422)-X(423)-X(424)-X(425)-X(426)-X(427)-X(428)-X(429)-X(430)-X(431)-X(432)-X(433)-X(434)-X(435)-X(436)-X(437)-X(438)-X(439)-X(440)-X(441)-X(442)-X(443)-X(444)-X(445)-X(446)-X(447)-.

[0039] In this aspect, X(118) is A; X(119) is S; X(120) is T; X(121) is K; X(122) is G; X(123) is P; X(124) is S; X(125) is V; X(126) is F; X(127) is P; X(128) is L; X(129) is A; X(130) is P; X(131) is C; X(132) is S; X(133) is R; X(134) is S; X(135) is T; X(136) is S; X(137) is G; X(138) is G; X(139) is T; X(140) is A; X(141) is A; X(142) is L; X(143) is G; X(144) is C; X(145) is L; X(146) is V; X(147) is K; X(148) is D; X(149) is Y; X(150) is F; X(151) is P; X(152) is E; X(153) is P; X(154) is V; X(155) is T; X(156) is V; X(157) is S; X(158) is W; X(159) is N; X(160) is S; X(161) is G; X(162) is A; X(163) is L; X(164) is T; X(165) is S; X(166) is G; X(167) is V; X(168) is H; X(169) is T; X(170) is F; X(171) is P; X(172) is A; X(173) is V; X(174) is L; X(175) is Q; X(176) is S; X(177) is S; X(178) is G; X(179) is L; X(180) is Y; X(181) is S; X(182) is L; X(183) is S; X(184) is S; X(185) is V; X(186) is V; X(187) is T; X(188) is V; X(189) is P; X(190) is S; X(191) is S; X(192) is S; X(193) is L; X(194) is G; X(195) is T; X(196) is Q; X(197) is T; X(198) is Y; X(199) is T; X(200) is C; X(201) is N; X(202) is V; X(203) is N; X(204) is H; X(205) is K; X(206) is P; X(207) is S; X(208) is N; X(209) is T; X(210) is K; X(211) is V; X(212) is D; X(213) is K; X(214) is R; X(215) is V; X(216) is E; X(217) is L; X(218) is K; X(219) is T; X(220) is P; X(221) is the sequence LGD; X(222) is T; X(223) is T; X(224) is H; X(225) is T; X(226) is C; X(227) is P; X(228) is the sequence RCPEPKSCDTPPPCPRCPEPKSCDTPPPCPRCPEPKSCDTPPPCPR; X(229) is C; X(230) is P; X(231) is A; X(232) is P; X(233) is E; X(234) is L; X(235) is L; X(236) is G; X(237) is G; X(238) is P; X(239) is S; X(240) is V; X(241) is F; X(242) is L; X(243) is F; X(244) is P; X(245) is P; X(246) is K; X(247) is P; X(248) is K; X(249) is D; X(250) is T; X(251) is selected from the group consisting of L, D, E, H, and T; X(252) is selected from the group consisting of M, D, E, and H; X(253) is selected from the group consisting of I, D, E, F, H, K, L, N, P, Q, R, S, T, V, W, and Y; X(254) is selected from the group consisting of S, E, K, N, P, Q, R, V, and W; X(255) is R; X(256) is selected from the group consisting of T, I, L, M, P, S, V, W, and Y; X(257) is P; X(258) is E; X(259) is selected from the group consisting of V and T; X(260) is T; X(261) is C; X(262) is V; X(263) is V; X(264) is V; X(265) is D; X(266) is V; X(267) is S; X(268) is H; X(269) is E; X(270) is D; X(271) is P; X(272) is E; X(273) is V; X(274) is Q; X(275) is F; X(276) is K; X(277) is W; X(278) is selected from the group consisting of Y, D, E, and S; X(279) is selected from the group consisting of V, A, Q, and T; X(280) is D; X(281) is G; X(282) is selected from the group consisting of V, F, G, I, L, P, Q, W, and Y; X(283) is selected from the group consisting of E and W; X(284) is V; X(285) is selected from the group consisting of H, E, P, and T; X(286) is N; X(287) is A; X(288) is K; X(289) is T; X(290) is K; X(291) is P; X(292) is R; X(293) is E; X(294) is E; X(295) is Q; X(296) is Y; X(297) is N; X(298) is S; X(299) is T; X(300) is selected from the group consisting of F, A, D, E, G, H, K, M, N, P, Q, R, S, T, and V; X(301) is selected from the group consisting of R, D, E, G, H, K, and Q; X(302) is selected from the group consisting of V, A, D, E, H, K, P, Q, S, and T; X(303) is selected from the group consisting of V, D, E, N, P, Q, and S; X(304) is S; X(305) is selected from the group consisting of V, G, P, and T; X(306) is selected from the group consisting of L, F, H, I, N, T, V, and Y; X(307) is T; X(308) is selected from the group consisting of V, A, N, P, and S; X(309) is selected from the group consisting of L, F, G, I, M, N, Q, S, T, V, W, and Y; X(310) is H; X(311) is selected from the group consisting of Q, D, E, G, P, T, and W; X(312) is D; X(313) is W; X(314) is L; X(315) is N; X(316) is G; X(317) is K; X(318) is E; X(319) is Y; X(320) is K; X(321) is C; X(322) is K; X(323) is V; X(324) is S; X(325) is N; X(326) is K; X(327) is A; X(328) is L; X(329) is P; X(330) is A; X(331) is P; X(332) is l; X(333) is E; X(334) is K; X(335) is T; X(336) is l; X(337) is S; X(338) is K; X(339) is T; X(340) is K; X(341) is G; X(342) is Q; X(343) is P; X(344) is R; X(345) is E; X(346) is P; X(347) is Q; X(348) is V; X(349) is Y; X(350) is T; X(351) is L; X(352) is P; X(353) is P; X(354) is S; X(355) is R; X(356) is E; X(357) is E; X(358) is M; X(359) is T; X(360) is K; X(361) is N; X(362) is Q; X(363) is V; X(364) is S; X(365) is L; X(366) is T; X(367) is C; X(368) is L; X(369) is V; X(370) is K; X(371) is G; X(372) is F; X(373) is Y; X(374) is P; X(375) is S; X(376) is D; X(377) is I; X(378) is A; X(379) is V; X(380) is E; X(381) is W; X(382) is E; X(383) is S; X(384) is S; X(385) is G; X(386) is Q; X(387) is P; X(388) is E; X(389) is N; X(390) is N; X(391) is Y; X(392) is N; X(393) is T; X(394) is T; X(395) is P; X(396) is P; X(397) is M; X(398) is L; X(399) is D; X(400) is S; X(401) is D; X(402) is G; X(403) is S; X(404) is F; X(405) is F; X(406) is L; X(407) is Y; X(408) is S; X(409) is K; X(410) is L; X(411) is T; X(412) is V; X(413) is D; X(414) is K; X(415) is S; X(416) is R; X(417) is W; X(418) is Q; X(419) is Q; X(420) is G; X(421) is N; X(422) is I; X(423) is F; X(424) is S; X(425) is C; X(426) is S; X(427) is V; X(428) is M; X(429) is H; X(430) is E; X(431) is A; X(432) is L; X(433) is H; X(434) is N; X(435) is R; X(436) is F;-X(437) is T; X(438) is Q; X(439) is K; X(440) is S; X(441) is L; X(442) is S; X(443) is L; X(444) is S; X(445) is P; X(446) is G; and X(447) is K. The non-naturally occurring protein having reduced immunogenicity as compared with a protein comprising SEQ ID NO:3.

[0040] In a further aspect, the non-naturally occurring protein comprising a variant Fc region comprising at least one amino acid modification of a naturally occurring protein sequence comprising SEQ ID NO:3. The modification is at a position selected from the group consisting of positions 251, 252, 253, 254, 256, 259, 278, 279, 282, 283, 285, 300, 301, 302, 303, 305, 306, 308, 309, and 311. The modification at position 251 is selected from the group consisting of D, E, H, and T; the modification at position 252 is selected from the group consisting of D, E, and H; the modification at position 253 is selected from the group consisting of D, E, F, H, K, L, N, P, Q, R, S, T, V, W, and Y; the modification at position 254 is selected from the group consisting of E, K, N, P, Q, R, V, and W; the modification at position 256 is selected from the group consisting of I, L, M, P, S, V, W, and Y; the modification at position 259 is T; the modification at position 278 is selected from the group consisting of D, E, and S; the modification at position 279 is selected from the group consisting of A, Q, and T; the modification at position 282 is selected from the group consisting of F, G, I, L, P, Q, W, and Y; the modification at position 283 is W; the modification at position 285 is selected from the group consisting of E, P, and T; the modification at position 300 is selected from the group consisting of A, D, E, G, H, K, M, N, P, Q, R, S, T, and V; the modification at position 301 is selected from the group consisting of D, E, G, H, K, and Q; the modification at position 302 is selected from the group consisting of A, D, E, H, K, P, Q, S, and T; the modification at position 303 is selected from the group consisting of D, E, N, P, Q, and S; the modification at position 305 is selected from the group consisting of G, P, and T; the modification at position 306 is selected from the group consisting of F, H, I, N, T, V, and Y; the modification at position 308 is selected from the group consisting of A, N, P, and S; the modification at position 309 is selected from the group consisting of F, G, I, M, N, Q, S, T, V, W, and Y; and, the modification at position 311 is selected from the group consisting of D, E, G, P, T, and W.

[0041] In a further variation, at least one modification is made to the group consisting of positions 251, 252, 253, 254, 256, 259, 278, 279, 282, 283, 285, 302, 303, 305, 306, 308, 309, and 311; and, the modification at position 251 is selected from the group consisting of D, E, H, and T; the modification at position 252 is D; the modification at position 253 is selected from the group consisting of D and E; the modification at position 256 is selected from the group consisting of M, W, and Y; the modification at position 278 is D; the modification at position 282 is selected from the group consisting of F, L, Q, and W; the modification at position 303 is selected from the group consisting of N, P, Q, and S; and, the modification at position 311 is D.

[0042] In a still further variation, the modification is made to an amino acid in the group consisting of Agretope 4 (145-153), Agretope 5 (149-157), Agretope 6 (167-175), Agretope 7 (174-182), Agretope 8 (179-187), Agretope 9 (180-188), Agretope 10 (182-190), Agretope 11a (185-193), Agretope 12 (202-210), Agretope 13 (215-223), Agretope 15 (240-248), Agretope 16 (251-259), Agretope 17a (262-270), Agretope 18 (277-285), Agretope 19b (300-308), Agretope 20a (302-310), Agretope 21a (303-311), Agretope 22a (348-356), Agretope 23 (369-377), Agretope 27b (422-430), and Agretope 28b (432-440). In another variation, the modification is made to an amino acid in the group consisting of Agretope 16 (251-259), Agretope 17a (262-270), Agretope 18 (277-285), Agretope 19b (300-308), Agretope 20a (302-310), Agretope 21 a (303-311), Agretope 22a (348-356), Agretope 23 (369-377), Agretope 27b (422-430), and Agretope 28b (432-440).

[0043] In another aspect, the present invention is directed to a non-naturally occurring protein comprising a variant Fc region having the formula:

[0044] -X(118)-X(119)-X(120)-X(121)-X(122)-X(123)-X(124)-X(125)-X(126)-X(127)-X(128)-X(129)-X(130)-X(131)-X(132)-X(133)-X(134)-X(135)-X(136)-X(137)-X(138)-X(139)-X(140)-X(141)-X(142)-X(143)-X(144)-X(145)-X(146)-X(147)-X(148)-X(149)-X(150)-X(151)-X(152)-X(153)-X(154)-X(155)-X(156)-X(157)-X(158)-X(159)-X(160)-X(161)-X(162)-X(163)-X(164)-X(165)-X(166)-X(167)-X(168)-X(169)-X(170)-X(171)-X(172)-X(173)-X(174)-X(175)-X(176)-X(177)-X(178)-X(179)-X(180)-X(181)-X(182)-X(183)-X(184)-X(185)-X(186)-X(187)-X(188)-X(189)-X(190)-X(191)-X(192)-X(193)-X(194)-X(195)-X(196)-X(197)-X(198)-X(199)-X(200)-X(201)-X(202)-X(203)-X(204)-X(205)-X(206)-X(207)-X(208)-X(209)-X(210)-X(211)-X(212)-X(213)-X(214)-X(215)-X(216)-X(217)-X(218)-X(219)-X(220)-X(221)-X(222)-X(223)-X(224)-X(225)-X(226)-X(227)-X(228)-X(229)-X(230)-X(231)-X(232)-X(233)-X(234)-X(235)-X(236)-X(237)-X(238)-X(239)-X(240)-X(241)-X(242)-X(243)-X(244)-X(245)-X(246)-X(247)-X(248)-X(249)-X(250)-X(251)-X(252)-X(253)-X(254)-X(255)-X(256)-X(257)-X(258)-X(259)-X(260)-X(261)-X(262)-X(263)-X(264)-X(265)-X(266)-X(267)-X(268)-X(269)-X(270)-X(271)-X(272)-X(273)-X(274)-X(275)-X(276)-X(277)-X(278)-X(279)-X(280)-X(281)-X(282)-X(283)-X(284)-X(285)-X(286)-X(287)-X(288)-X(289)-X(290)-X(291)-X(292)-X(293)-X(294)-X(295)-X(296)-X(297)-X(298)-X(299)-X(300)-X(301)-X(302)-X(303)-X(304)-X(305)-X(306)-X(307)-X(308)-X(309)-X(310)-X(311)-X(312)-X(313)-X(314)-X(315)-X(316)-X(317)-X(318)-X(319)-X(320)-X(321)-X(322)-X(323)-X(324)-X(325)-X(326)-X(327)-X(328)-X(329)-X(330)-X(331)-X(332)-X(333)-X(334)-X(335)-X(336)-X(337)-X(338)-X(339)-X(340)-X(341)-X(342)-X(343)-X(344)-X(345)-X(346)-X(347)-X(348)-X(349)-X(350)-X(351)-X(352)-X(353)-X(354)-X(355)-X(356)-X(357)-X(358)-X(359)-X(360)-X(361)-X(362)-X(363)-X(364)-X(365)-X(366)-X(367)-X(368)-X(369)-X(370)-X(371)-X(372)-X(373)-X(374)-X(375)-X(376)-X(377)-X(378)-X(379)-X(380)-X(381)-X(382)-X(383)-X(384)-X(385)-X(386)-X(387)-X(388)-X(389)-X(390)-X(391)-X(392)-X(393)-X(394)-X(395)-X(396)-X(397)-X(398)-X(399)-X(400)-X(401)-X(402)-X(403)-X(404)-X(405)-X(406)-X(407)-X(408)-X(409)-X(410)-X(411)-X(412)-X(413)-X(414)-X(415)-X(416)-X(417)-X(418)-X(419)-X(420)-X(421)-X(422)-X(423)-X(424)-X(425)-X(426)-X(427)-X(428)-X(429)-X(430)-X(431)-X(432)-X(433)-X(434)-X(435)-X(436)-X(437)-X(438)-X(439)-X(440)-X(441)-X(442)-X(443)-X(444)-X(445)-X(446)-X(447)-.

[0045] X(118) is A; X(119) is S; X(120) is T; X(121) is K; X(122) is G; X(123) is P; X(124) is S; X(125) is V; X(126) is F; X(127) is P; X(128) is L; X(129) is A; X(130) is P; X(131) is C; X(132) is S; X(133) is R; X(134) is S; X(135) is T; X(136) is S; X(137) is E; X(138) is S; X(139) is T; X(140) is A; X(141) is A; X(142) is L; X(143) is G; X(144) is C; X(145) is L; X(146) is V; X(147) is K; X(148) is D; X(149) is Y; X(150) is F; X(151) is P; X(152) is E; X(153) is P; X(154) is V; X(155) is T; X(156) is V; X(157) is S; X(158) is W; X(159) is N; X(160) is S; X(161) is G; X(162) is A; X(163) is L; X(164) is T; X(165) is S; X(166) is G; X(167) is V; X(168) is H; X(169) is T; X(170) is F; X(171) is P; X(172) is A; X(173) is V; X(174) is L; X(175) is Q; X(176) is S; X(177) is S; X(178) is G; X(179) is L; X(180) is Y; X(181) is S; X(182) is L; X(183) is S; X(184) is S; X(185) is V; X(186) is V; X(187) is T; X(188) is V; X(189) is P; X(190) is S; X(191) is S; X(192) is S; X(193) is L; X(194) is G; X(195) is T; X(196) is K; X(197) is T; X(198) is Y; X(199) is T; X(200) is C; X(201) is N; X(202) is V; X(203) is D; X(204) is H; X(205) is K; X(206) is P; X(207) is S; X(208) is N; X(209) is T; X(210) is K; X(211) is V; X(212) is D; X(213) is K; X(214) is R; X(215) is V; X(216) is E; X(217) is S; X(218) is K; X(219) is Y; X(220) is G; X(221) is a bond; X(222) is a bond; X(223) is a bond; X(224) is P; X(225) is P; X(226) is C; X(227) is P; X(228) is S; X(229) is C; X(230) is P; X(231) is A; X(232) is P; X(233) is E; X(234) is F; X(235) is L; X(236) is G; X(237) is G; X(238) is P; X(239) is S; X(240) is V; X(241) is F; X(242) is L; X(243) is F; X(244) is P; X(245) is P; X(246) is K; X(247) is P; X(248) is K; X(249) is D; X(250) is T; X(251) is selected from the group consisting of L, D, E, H, and T; X(252) is selected from the group consisting of M, D, E, and H; X(253) is selected from the group consisting of I, D, E, F, H, K, L, N, P, Q, R, S, T, V, W, and Y; X(254) is selected from the group consisting of S, E, K, N, P, Q, R, V, and W; X(255) is R; X(256) is selected from the group consisting of T, I, L, M, P, S, V, W, and Y; X(257) is P; X(258) is E; X(259) is selected from the group consisting of V and T; X(260) is T; X(261) is C; X(262) is V; X(263) is V; X(264) is V; X(265) is D; X(266) is V; X(267) is S; X(268) is Q; X(269) is E; X(270) is D; X(271) is P; X(272) is E; X(273) is V; X(274) is Q; X(275) is F; X(276) is N; X(277) is W; X(278) is selected from the group consisting of Y, D and E; X(279) is selected from the group consisting of V, A, Q, T, and W; X(280) is D; X(281) is G; X(282) is selected from the group consisting of V, F, G, I, L, Q, and W; X(283) is E; X(284) is V; X(285) is selected from the group consisting of H, P, and T; X(286) is N; X(287) is A; X(288) is K; X(289) is T; X(290) is K; X(291) is P; X(292) is R; X(293) is E; X(294) is E; X(295) is Q; X(296) is F; X(297) is N; X(298) is S; X(299) is T; X(300) is Y; X(301) is selected from the group consisting of R, G, K, and Q; X(302) is selected from the group consisting of V, A, E, H, K, Q, S, and T; X(303) is selected from the group consisting of V, N, P, Q, R, and S; X(304) is S; X(305) is selected from the group consisting of V, G, P, and T; X(306) is selected from the group consisting of L, F, H, I, N, T, V, and Y; X(308) is selected from the group consisting of V, A, N, P, and S; X(309) is selected from the group consisting of L, F, G, I, M, N, Q, S, T, V, W, and Y; X(310) is H; X(311) is selected from the group consisting of Q, D, E, G, P, T, and W; X(312) is D; X(313) is W; X(314) is L; X(315) is N; X(316) is G; X(317) is K; X(318) is E; X(319) is Y; X(320) is K; X(321) is C; X(322) is K; X(323) is V; X(324) is S; X(325) is N; X(326) is K; X(327) is G; X(328) is L; X(329) is P; X(330) is S; X(331) is S; X(332) is l; X(333) is E; X(334) is K; X(335) is T; X(336) is I; X(337) is S; X(338) is K; X(339) is A; X(340) is K; X(341) is G; X(342) is Q; X(343) is P; X(344) is R; X(345) is E; X(346) is P; X(347) is Q; X(348) is V; X(349) is Y; X(350) is T; X(351) is L; X(352) is P; X(353) is P; X(354) is S; X(355) is Q; X(356) is E; X(357) is E; X(358) is M; X(359) is T; X(360) is K; X(361) is N; X(362) is Q; X(363) is V; X(364) is S; X(365) is L; X(366) is T; X(367) is C; X(368) is L; X(369) is V; X(370) is K; X(371) is G; X(372) is F; X(373) is Y; X(374) is P; X(375) is S; X(376) is D; X(377) is l; X(378) is A; X(379) is V; X(380) is E; X(381) is W; X(382) is E; X(383) is S; X(384) is N; X(385) is G; X(386) is Q; X(387) is P; X(388) is E; X(389) is N; X(390) is N; X(391) is Y; X(392) is K; X(393) is T; X(394) is T; X(395) is P; X(396) is P; X(397) is V; X(398) is L; X(399) is D; X(400) is S; X(401) is D; X(402) is G; X(403) is S; X(404) is selected from the group consisting of F, H, I, L, M, N, Q, T, and V; X(405) is selected from the group consisting of F and W; X(406) is selected from the group consisting of L, A, D, E, G, K, N, Q, S, T, and V; X(407) is selected from the group consisting of Y and M; X(408) is S; X(409) is selected from the group consisting of R, G, Q, and S; X(410) is selected from the group consisting of L, F, Q, and Y; X(411) is T; X(412) is selected from the group consisting of V and P; X(413) is D; X(414) is K; X(415) is S; X(416) is R; X(417) is W; X(418) is Q; X(419) is E; X(420) is G; X(421) is N; X(422) is V; X(423) is F; X(424) is S; X(425) is C; X(426) is S; X(427) is V; X(428) is M; X(429) is H; X(430) is E; X(431) is A; X(432) is selected from the group consisting of L, E and K; X(433) is selected from the group consisting of H, D, G, P, S, T, and W; X(434) is selected from the group consisting of N, D, E, G, H, S, T, and W; X(435) is selected from the group consisting of H, G, K, M, N, P, S, T, and V; X(436) is Y; X(437) is selected from the group consisting of T, D, E, G, H, K, N, Q, and S; X(438) is selected from the group consisting of Q, G, P, S, and T; (439) is K; X(440) is selected from the group consisting of S, D, E, G, H, K, N, P, Q, R, and T; X(441) is L; X(442) is S; X(443) is L; X(444) is S; X(445) is L; X(446) is G; and X(447) is K. The non-naturally occurring protein has reduced immunogenicity as compared with a protein comprising SEQ ID NO:4.

[0046] In another aspect, the present invention is directed to a non-naturally occurring protein comprising a variant Fc region comprising at least one amino acid modification of SEQ ID NO:4. At least one modification is made to the group consisting of positions 251, 252, 253, 254, 256, 259, 278, 279, 282, 283, 285, 300, 301, 302, 303, 305, 306, 308, 309, 311, 404, 405, 406, 407, 409, 410, 412, 432, 433, 434, 435, 437, 438, and 440; and, wherein the modification at position 251 is selected from the group consisting of D, E, H, and T; wherein the modification at position 252 is selected from the group consisting of D, E, and H; wherein the modification at position 253 is selected from the group consisting of D, E, F, H, K, L, N, P, Q, R, S, T, V, W, and Y; wherein the modification at position 254 is selected from the group consisting of E, K, N, P, Q, R, V, and W; wherein the modification at position 256 is selected from the group consisting of I, L, M, P, S, V, W, and Y; wherein the modification at position 259 is T; wherein the modification at position 278 is selected from the group consisting of D and E; wherein the modification at position 279 is selected from the group consisting of A, Q, T, and W; wherein the modification at position 282 is selected from the group consisting of F, G, I, L, P, Q, W, and Y; wherein the modification at position 283 is G; wherein the modification at position 285 is selected from the group consisting of E, P, and T; wherein the modification at position 300 is selected from the group consisting of A, D, E, G, H, K, M, N, P, Q, R, S, T, and V; wherein the modification at position 301 is selected from the group consisting of D, E, G, K, and Q; wherein the modification at position 302 is selected from the group consisting of A, E, H, K, Q, S, and T; wherein the modification at position 303 is selected from the group consisting of D, E, N, P, Q, R, and S; wherein the modification at position 305 is selected from the group consisting of G, P, and T; wherein the modification at position 306 is selected from the group consisting of F, H, I, N, T, V, and Y; wherein the modification at position 308 is selected from the group consisting of A, N, P, and S; wherein the modification at position 309 is selected from the group consisting of F, G, I, M, N, Q, S, T, V, W, and Y; wherein the modification at position 311 is selected from the group consisting of D, E, G, P, T, and W; wherein the modification at position 404 is selected from the group consisting of H, I, L, M, N, Q, T, and V; wherein the modification at position 405 is W; wherein the modification at position 406 is selected from the group consisting of A, D, E, G, K, N, Q, S, T, and V; wherein the modification at position 407 is M; wherein the modification at position 409 is selected from the group consisting of G, Q, and S; wherein the modification at position 410 is selected from the group consisting of F, Q, and Y; wherein the modification at position 412 is P; wherein the modification at position 432 is selected from the group consisting of E and K; wherein the modification at position 433 is selected from the group consisting of D, G, P, S, T, and W; wherein the modification at position 434 is selected from the group consisting of D, E, G, H, S, T, and W; wherein the modification at position 435 is selected from the group consisting of G, K, M, N, P, S, T, and V; wherein the modification at position 437 is selected from the group consisting of D, E, G, H, K, N, Q, and S; wherein the modification at position 438 is selected from the group consisting of G, P, S, and T; and, wherein the modification at position 440 is selected from the group consisting of D, E, G, H, K, N, P, Q, R, and T. The non-naturally occurring protein having reduced immunogenicity as compared with a protein comprising SEQ ID NO:4.

[0047] In one variation, the modification is made to the group consisting of positions 251, 252, 253, 254, 256, 259, 278, 279, 282, 283, 285, 300, 301, 302, 303, 305, 306, 308, 309, 311, 404, 405, 406, 407, 409, 410, 412, 432, 433, 434, 435, 437, 438, and 440; and, wherein the modification at position 251 is selected from the group consisting of D, E, H, and T; wherein the modification at position 252 is D; wherein the modification at position 253 is selected from the group consisting of D and E; wherein the modification at position 256 is selected from the group consisting of M, W, and Y; wherein the modification at position 278 is D; wherein the modification at position 282 is selected from the group consisting of F, G, L, Q, W, and Y; wherein the modification at position 300 is selected from the group consisting of A, D, E, G, H, K, N, P, Q, R, S, and T; wherein the modification at position 301 is D; wherein the modification at position 303 is selected from the group consisting of D, E, N, P, Q, R, and S; wherein the modification at position 311 is D; wherein the modification at position 404 is selected from the group consisting of H, N, Q, and T; wherein the modification at position 432 is selected from the group consisting of E and K; and, wherein the modification at position 437 is E.

[0048] In a further variation, at least one modification is made to an amino acid in Agretope 16 (251-259), Agretope 17b (262-270), Agretope 18 (277-285), Agretope 19a (300-308), Agretope 20a (302-310), Agretope 21a (303-311), Agretope 22b (348-356), Agretope 23 (369-377), Agretope 24b (404-412), Agretope 25b (406-414), Agretope 26 (407-415), Agretope 27a (422-430), or Agretope 28a(432-440), Alternatively, at least one modification is made to an amino acid in Agretope 4 (145-153), Agretope 5 (149-157), Agretope 6 (167-175), Agretope 7 (174-182), Agretope 8 (179-187), Agretope 9 (180-188), Agretope 10 (182-190), Agretope 11a (185-193), Agretope 14 (234-242), Agretope 15 (240-248), Agretope 16 (251-259), Agretope 17b (262-270), Agretope 18 (277-285), Agretope 19a (300-308), Agretope 20a (302-310), Agretope 21a (303-311), Agretope 22b (348-356), Agretope 23 (369-377), Agretope 24b (404-412), Agretope 25b (406-414), Agretope 26 (407-415), Agretope 27a (422-430), and Agretope 28a (432-440).

### BRIEF DESCRIPTION OF THE FIGURES

[0049] FIG. 1. Antibody structure and function. Shown is a model of a full length human IgG1 antibody, modeled using a humanized Fab structure from pdb accession code 1CE1 (James et al., 1999, J Mol Biol 289:293-301, entirely incorporated by reference) and a human IgG1 Fc structure from pdb accession code 1DN2 (DeLano et al., 2000, Science 287:1279-1283, entirely incorporated by reference). The flexible hinge that links the Fab and Fc regions is not shown. IgG1 is a homodimer of heterodimers, made up of two light chains and two heavy chains. The Ig domains that comprise the antibody are labeled, and include V_{L} and C_{L} for the light chain, and V_{H}, Cgamma1(Cγ1), Cgamma2 (Cγ2), and Cgamma3 (Cγ3) for the heavy chain. The Fc region is labeled. Binding sites for relevant proteins are labeled, including the antigen binding site in the variable region, and the binding sites for FcγRs, FcRn, C1q, and proteins A and G in the Fc region.

[0050] FIG. 2 shows amino acid sequences of various antibodies, Fc fusions, and fragments and variants thereof.

[0051] FIG. 3 shows a method for engineering less immunogenic antibodies and Fc fusion proteins.

[0052] FIG. 4 shows a schematic representation of a method for in vitro testing of the immunogenicity of antibodies and Fc fusion proteins and peptides derived from antibodies and Fc fusion proteins with IVV technology.

[0053] FIG. 5 shows conservative mutations (BLOSUM62 score>=0).

[0054] FIG. 6 shows MHC agretopes in the IgG constant regions (SEQ ID NO:1-4).

[0055] FIG. 7 shows allele binding specificity of predicted agretopes in the IgG constant regions (SEQ ID NO:1-4).

[0056] FIG. 8 shows the IScore of MHC binding agretopes in antibody germline heavy chain variable region (VH, SEQ. ID. NO. 5-31).

[0057] FIG. 9 shows the IScore of MHC binding agretopes in antibody germline heavy chain variable region (VH, SEQ. ID. NO. 32-58).

[0058] FIG. 10 shows the IScore of MHC binding agretopes in antibody germline kappa light chain variable region (VH, SEQ. ID. NO. 59-84).

[0059] FIG. 11 shows the IScore of MHC binding agretopes in antibody germline kappa light chain variable region (VH, SEQ. ID. NO. 85-104).

[0060] FIG. 12 shows the IScore of MHC binding agretopes in antibody germline lambda light chain variable region (VH, SEQ. ID. NO. 105-129).

[0061] FIG. 13 shows the IScore of MHC binding agretopes in antibody germline lambda light chain variable region (VH, SEQ. ID. NO. 130-144).

[0062] FIG. 14 shows the B(wt), I(alt), and and B(alt) scores of agretope 5 (IgG1,2,3,4 constant region residues 149-157).

[0063] FIG. 15 shows the B(wt), I(alt), and and B(alt) scores of agretope 16 (IgG1,2,3,4 constant region residues 251-259).

[0064] FIG. 16 shows the B(wt), I(alt), and and B(alt) scores of agretope 18 (IgG1,2,3,4 constant region residues 277-285).

[0065] FIG. 17 shows the B(wt), I(alt), and and B(alt) scores of agretope 19a (IgG1,4 constant region residues 300-308).

[0066] FIG. 18 shows the B(wt), I(alt), and and B(alt) scores of agretope 19b (IgG2,3 constant region residues 300-308).

[0067] FIG. 19 shows the B(wt), I(alt), and and B(alt) scores of agretope 21a (IgG1,3,4 constant region residues 303-311).

[0068] FIG. 20 shows the B(wt), I(alt), and and B(alt) scores of agretope 24a (IgG1,2 constant region residues 404-412).

[0069] FIG. 21 shows the B(wt), I(alt), and and B(alt) scores of agretope 24b (IgG4 constant region residues 404-412).

[0070] FIG. 22 shows the B(wt), I(alt), and and B(alt) scores of agretope 28a (IgG1,2,4 constant region residues 432-440).

[0071] FIG. 23 shows suitable less immunogenic variants of agretope 16 (IgG1,2,3,4 constant region residues 251-259).

[0072] FIG. 24 shows suitable less immunogenic variants of agretope 18 (IgG1,2,3,4 constant region residues 277-285).

[0073] FIG. 25 shows suitable less immunogenic variants of agretope 19a (IgG1,4 constant region residues 300-308).

[0074] FIG. 26 shows suitable less immunogenic variants of agretope 19b (IgG2,3 constant region residues 300-308).

[0075] FIG. 27 shows suitable less immunogenic variants of agretope 21a (IgG1,3,4 constant region residues 303-311).

[0076] FIG. 28 shows suitable less immunogenic variants of agretope 24a (IgG1,2 constant region residues 404-412).

[0077] FIG. 29 shows less immunogenic variants of agretope 24b (IgG4 constant region residues 404-412).

[0078] FIG. 30 shows less immunogenic variants of agretope 28a (IgG1,2,4 constant region residues 432-440).

[0079] FIG. 31 shows MHC agretopes in Fc variants with significantly decreased IScore at one or more agretopes.

[0080] FIG. 32 shows MHC agretopes in Fc variants with significantly increased IScore at one or more agretopes.

[0081] FIG. 33 shows IScore of MHC agretopes in especially preferred Fc variants versus the parent human IgG1 sequence (SEQ ID NO:1).

[0082] FIG. 34 shows ingle amino acid changes in human heavy chain variable domain germline sequences that preserve fully human sequence content and reduce IScore for at least one predicted agretope.

[0083] FIG. 35 shows single amino acid changes in human light chain variable domain germline sequences that preserve fully human sequence content and reduce IScore for at least one predicted agretope.

### DETAILED DESCRIPTION OF THE INVENTION

[0084] By “nine-mer peptide frame” and grammatical equivalents herein is meant a linear sequence of nine amino acids that is located in a protein of interest. nine-mer frames may be analyzed for their propensity to bind one or more class II MHC alleles. By “antigen” and grammatical equivalents is meant a molecule or molecules that are recognized by an antibody or Fc fusion. Examples of suitable antigens include, but are not limited to, 17-IA, 4-1BB, 4Dc, 6-keto-PGF1a, 8-iso-PGF2a, 8-oxo-dG, A1 Adenosine Receptor, A33, ACE, ACE-2, Activin, Activin A, Activin AB, Activin B, Activin C, Activin RIA, Activin RIA ALK-2, Activin RIB ALK-4, Activin RIIA, Activin RIIB, ADAM, ADAM10, ADAM12, ADAM15, ADAM17/TACE, ADAM8, ADAM9, ADAMTS, ADAMTS4, ADAMTS5, Addressins, aFGF, ALCAM, ALK, ALK-1, ALK-7, alpha-1-antitrypsin, alpha-V/beta-1 antagonist, ANG, Ang, APAF-1, APE, APJ, APP, APRIL, AR, ARC, ART, Artemin, anti-Id, ASPARTIC, Atrial natriuretic factor, av/b3 integrin, Axl, b2M, B7-1, B7-2, B7-H, B-lymphocyte Stimulator (BlyS), BACE, BACE-1, Bad, BAFF, BAFF-R, Bag-1, BAK, Bax, BCA-1, BCAM, Bcl, BCMA, BDNF, b-ECGF, bFGF, BID, Bik, BIM, BLC, BL-CAM, BLK, BMP, BMP-2 BMP-2a, BMP-3 Osteogenin, BMP-4 BMP-2b, BMP-5, BMP-6 Vgr-1, BMP-7 (OP-1), BMP-8 (BMP-8a, OP-2), BMPR, BMPR-IA (ALK-3), BMPR-IB (ALK-6), BRK-2, RPK-1, BMPR-II (BRK-3), BMPs, b-NGF, BOK, Bombesin, Bone-derived neurotrophic factor, BPDE, BPDE-DNA, BTC, complement factor 3 (C3), C3a, C4, C5, C5a, C10, CA125, CAD-8, Calcitonin, cAMP, carcinoembryonic antigen (CEA), carcinoma-associated antigen, Cathepsin A, Cathepsin B, Cathepsin C/DPPI, Cathepsin D, Cathepsin E, Cathepsin H, Cathepsin L, Cathepsin O, Cathepsin S, Cathepsin V, Cathepsin X/Z/P, CBL, CCI, CCK2, CCL, CCL1, CCL11, CCL12, CCL13, CCL14, CCL15, CCL16, CCL17, CCL18, CCL19, CCL2, CCL20, CCL21, CCL22, CCL23, CCL24, CCL25, CCL26, CCL27, CCL28, CCL3, CCL4, CCL5, CCL6, CCL7, CCL8, CCL9/10, CCR, CCR1, CCR10, CCR10, CCR2, CCR3, CCR4, CCR5, CCR6, CCR7, CCR8, CCR9, CD1, CD2, CD3, CD3E, CD4, CD5, CD6, CD7, CD8, CD10, CD11a, CD11b, CD11c, CD13, CD14, CD15, CD16, CD18, CD19, CD20, CD21, CD22, CD23, CD25, CD27L, CD28, CD29, CD30, CD30L, CD32, CD33, (p67 proteins), CD34, CD38, CD40, CD40L, CD44, CD45, CD46, CD49a, CD52, CD54, CD55, CD56, CD61, CD64, CD66e, CD74, CD80 (B7-1), CD89, CD95, CD123, CD137, CD138, CD140a, CD146, CD147, CD148, CD152, CD164, CEACAM5, CFTR, cGMP, CINC, Clostridium botulinum toxin, Clostridium perfringens toxin, CKb8-1, CLC, CMV, CMV UL, CNTF, CNTN-1, COX, C-Ret, CRG-2, CT-1, CTACK, CTGF, CTLA-4, CX3CL1, CX3CR1, CXCL, CXCL1, CXCL2, CXCL3, CXCL4, CXCL5, CXCL6, CXCL7, CXCL8, CXCL9, CXCL10, CXCL11, CXCL12, CXCL13, CXCL14, CXCL15, CXCL16, CXCR, CXCR1, CXCR2, CXCR3, CXCR4, CXCR5, CXCR6, cytokeratin tumor-associated antigen, DAN, DCC, DcR3, DC-SIGN, Decay accelerating factor, des(1-3)-IGF-I (brain IGF-1), Dhh, digoxin, DNAM-1, Dnase, Dpp, DPPIV/CD26, Dtk, ECAD, EDA, EDA-A1, EDA-A2, EDAR, EGF, EGFR (ErbB-1), EMA, EMMPRIN, ENA, endothelin receptor, Enkephalinase, eNOS, Eot, eotaxin1, EpCAM, Ephrin B2/EphB4, EPO, ERCC, E-selectin, ET-1, Factor IIa, Factor VII, Factor VIIIc, Factor IX, fibroblast activation protein (FAP), Fas, FcR1, FEN-1, Ferritin, FGF, FGF-19, FGF-2, FGF3, FGF-8, FGFR, FGFR-3, Fibrin, FL, FLIP, Flt-3, Flt-4, Follicle stimulating hormone, Fractalkine, FZD1, FZD2, FZD3, FZD4, FZD5, FZD6, FZD7, FZD8, FZD9, FZD10, G250, Gas 6, GCP-2, GCSF, GD2, GD3, GDF, GDF-1, GDF-3 (Vgr-2), GDF-5 (BMP-14, CDMP-1), GDF-6 (BMP-13, CDMP-2), GDF-7 (BMP-12, CDMP-3), GDF-8 (Myostatin), GDF-9, GDF-15 (MIC-1), GDNF, GDNF, GFAP, GFRa-1, GFR-alpha1, GFR-alpha2, GFR-alpha3, GITR, Glucagon, Glut 4, glycoprotein IIb/IIIa (GP IIb/IIIa), GM-CSF, gp130, gp72, GRO, Growth hormone releasing factor, Hapten (NP-cap or NIP-cap), HB-EGF, HCC, HCMV gB envelope glycoprotein, HCMV) gH envelope glycoprotein, HCMV UL, Hemopoietic growth factor (HGF), Hep B gp120, heparanase, Her2, Her2/neu (ErbB-2), Her3 (ErbB-3), Her4 (ErbB-4), herpes simplex virus (HSV) gB glycoprotein, HSV gD glycoprotein, HGFA, High molecular weight melanoma-associated antigen (HMW-MAA), HIV gp120, HIV IIIB gp 120 V3 loop, HLA, HLA-DR, HM1.24, HMFG PEM, HRG, Hrk, human cardiac myosin, human cytomegalovirus (HCMV), human growth hormone (HGH), HVEM, I-309, IAP, ICAM, ICAM-1, ICAM-3, ICE, ICOS, IFNg, Ig, IgA receptor, IgE, IGF, IGF binding proteins, IGF-1R, IGFBP, IGF-I, IGF-II, IL, IL-1, IL-1R, IL-2, IL-2R, IL-4, IL-4R, IL-5, IL-5R, IL-6, IL-6R, IL-8, IL-9, IL-10, IL-12, IL-13, IL-15, IL-18, IL-18R, IL-23, interferon (INF)-alpha, INF-beta, INF-gamma, Inhibin, iNOS, Insulin A-chain, Insulin B-chain, Insulin-like growth factor 1, integrin alpha2, integrin alpha3, integrin alpha4, integrin alpha4/beta1, integrin alpha4/beta7, integrin alpha5 (alphaV), integrin alpha5/beta1, integrin alpha5/beta3, integrin alpha6, integrin beta1, integrin beta2, interferon gamma, IP-10, I-TAC, JE, Kallikrein 2, Kallikrein 5, Kallikrein 6, Kallikrein 11, Kallikrein 12, Kallikrein 14, Kallikrein 15, Kallikrein L1, Kallikrein L2, Kallikrein L3, Kallikrein L4, KC, KDR, Keratinocyte Growth Factor (KGF), laminin 5, LAMP, LAP, LAP (TGF-1), Latent TGF-1, Latent TGF-1 bp1, LBP, LDGF, LECT2, Lefty, Lewis-Y antigen, Lewis-Y related antigen, LFA-1, LFA-3, Lfo, LIF, LIGHT, lipoproteins, LIX, LKN, Lptn, L-Selectin, LT-a, LT-b, LTB4, LTBP-1, Lung surfactant, Luteinizing hormone, Lymphotoxin Beta Receptor, Mac-1, MAdCAM, MAG, MAP2, MARC, MCAM, MCAM, MCK-2, MCP, M-CSF, MDC, Mer, METALLOPROTEASES, MGDF receptor, MGMT, MHC (HLA-DR), MIF, MIG, MIP, MIP-1-alpha, MK, MMAC1, MMP, MMP-1, MMP-10, MMP-11, MMP-12, MMP-13, MMP-14, MMP-15, MMP-2, MMP-24, MMP-3, MMP-7, MMP-8, MMP-9, MPIF, Mpo, MSK, MSP, mucin (Muc1), MUC18, Muellerian-inhibitin substance, Mug, MuSK, NAIP, NAP, NCAD, N-Cadherin, NCA 90, NCAM, NCAM, Neprilysin, Neurotrophin-3,-4, or -6, Neurturin, Neuronal growth factor (NGF), NGFR, NGF-beta, nNOS, NO, NOS, Npn, NRG-3, NT, NTN, OB, OGG1, OPG, OPN, OSM, OX40L, OX40R, p150, p95, PADPr, Parathyroid hormone, PARC, PARP, PBR, PBSF, PCAD, P-Cadherin, PCNA, PDGF, PDGF, PDK-1, PECAM, PEM, PF4, PGE, PGF, PGI2, PGJ2, PIN, PLA2, placental alkaline phosphatase (PLAP), PIGF, PLP, PP14, Proinsulin, Prorelaxin, Protein C, PS, PSA, PSCA, prostate specific membrane antigen (PSMA), PTEN, PTHrp, Ptk, PTN, R51, RANK, RANKL, RANTES, RANTES, Relaxin A-chain, Relaxin B-chain, renin, respiratory syncytial virus (RSV) F, RSV Fgp, Ret, Rheumatoid factors, RLIP76, RPA2, RSK, S100, SCF/KL, SDF-1, SERINE, Serum albumin, sFRP-3, Shh, SIGIRR, SK-1, SLAM, SLPI, SMAC, SMDF, SMOH, SOD, SPARC, Stat, STEAP, STEAP-II, TACE, TACI, TAG-72 (tumor-associated glycoprotein-72), TARC, TCA-3, T-cell receptors (e.g., T-cell receptor alpha/beta), TdT, TECK, TEM1, TEM5, TEM7, TEM8, TERT, testicular PLAP-like alkaline phosphatase, TfR, TGF, TGF-alpha, TGF-beta, TGF-beta Pan Specific, TGF-beta RI (ALK-5), TGF-beta RII, TGF-beta RIIb, TGF-beta RIII, TGF-beta1, TGF-beta2, TGF-beta3, TGF-beta4, TGF-beta5, Thrombin, Thymus Ck-1, Thyroid stimulating hormone, Tie, TIMP, TIQ, Tissue Factor, TMEFF2, Tmpo, TMPRSS2, TNF, TNF-alpha, TNF-alpha beta, TNF-beta2, TNFc, TNF-RI, TNF-RII, TNFRSF10A (TRAIL R1 Apo-2, DR4), TNFRSF10B (TRAIL R2 DR5, KILLER, TRICK-2A, TRICK-B), TNFRSF10C (TRAIL R3 DcR1, LIT, TRID), TNFRSF10D (TRAIL R4 DcR2, TRUNDD), TNFRSF11A (RANK ODF R, TRANCE R), TNFRSF11B (OPG OCIF, TR1), TNFRSF12 (TWEAK R FN14), TNFRSF13B (TACI), TNFRSF13C (BAFF R), TNFRSF14 (HVEM ATAR, HveA, LIGHT R, TR2), TNFRSF16 (NGFR p75NTR), TNFRSF17 (BCMA), TNFRSF18 (GITR AITR), TNFRSF19 (TROY TAJ, TRADE), TNFRSF19L (RELT), TNFRSF1A (TNF RI CD120a, p55-60), TNFRSF1B (TNF RII CD120b, p75-80), TNFRSF26 (TNFRH3), TNFRSF3 (LTbR TNF RIII, TNFC R), TNFRSF4 (OX40 ACT35, TXGP1 R), TNFRSF5 (CD40 p50), TNFRSF6 (Fas Apo-1, APT1, CD95), TNFRSF6B (DcR3 M68, TR6), TNFRSF7 (CD27), TNFRSF8 (CD30), TNFRSF9 (4-1BB CD137, ILA), TNFRSF21 (DR6), TNFRSF22 (DCTRAIL R2 TNFRH2), TNFRST23 (DCTRAIL R1 TNFRH1), TNFRSF25 (DR3 Apo-3, LARD, TR-3, TRAMP, WSL-1), TNFSF10 (TRAIL Apo-2 Ligand, TL2), TNFSF11 (TRANCE/RANK Ligand ODF, OPG Ligand), TNFSF12 (TWEAK Apo-3 Ligand, DR3 Ligand), TNFSF13 (APRIL TALL2), TNFSF13B (BAFF BLYS, TALL1, THANK, TNFSF20), TNFSF14 (LIGHT HVEM Ligand, LTg), TNFSF15 (TL1A/VEGI), TNFSF18 (GITR Ligand AITR Ligand, TL6), TNFSF1A (TNF-a Conectin, DIF, TNFSF2), TNFSF1B (TNF-b LTa, TNFSF1), TNFSF3 (LTb TNFC, p33), TNFSF4 (OX40 Ligand gp34, TXGP1), TNFSF5 (CD40 Ligand CD154, gp39, HIGM1, IMD3, TRAP), TNFSF6 (Fas Ligand Apo-1 Ligand, APT1 Ligand), TNFSF7 (CD27 Ligand CD70), TNFSF8 (CD30 Ligand CD153), TNFSF9 (4-1BB Ligand CD137 Ligand), TP-1, t-PA, Tpo, TRAIL, TRAIL R, TRAIL-R1, TRAIL-R2, TRANCE, transferring receptor, TRF, Trk, TROP-2, TSG, TSLP, tumor-associated antigen CA 125, tumor-associated antigen expressing Lewis Y related carbohydrate, TWEAK, TXB2, Ung, uPAR, uPAR-1, Urokinase, VCAM, VCAM-1, VECAD, VE-Cadherin, VE-cadherin-2, VEFGR-1 (flt-1), VEGF, VEGFR, VEGFR-3 (flt-4), VEGI, VIM, Viral antigens, VLA, VLA-1, VLA-4, VNR integrin, von Willebrands factor, WIF-1, WNT1, WNT2, WNT2B/13, WNT3, WNT3A, WNT4, WNT5A, WNT5B, WNT6, WNT7A, WNT7B, WNT8A, WNT8B, WNT9A, WNT9A, WNT9B, WNT10A, WNT10B, WNT11, WNT16, XCL1, XCL2, XCR1, XCR1, XEDAR, XIAP, XPD, and receptors for hormones and growth factors. By “allele” and grammatical equivalents herein is meant an alternative form of a gene. Specifically, in the context of class II MHC molecules, alleles comprise all naturally occurring sequence variants of DRA, DRB1, DRB3/4/5, DQA1, DQB1, DPA1, and DPB1 molecules. By “antibody or Fc fusion protein responsive disorders or conditions” and grammatical equivalents herein is meant diseases, disorders, and conditions that can benefit from treatment with an antibody or Fc fusion protein. Examples of antibody or Fc fusion protein-responsive disorders include, but are not limited to, autoimmune diseases, cancer, inflammatory disorders, infectious diseases, and additional conditions including but not limited to heart conditions such as congestive heart failure (CHF), myocarditis and other conditions of the myocardium; skin conditions such as rosecea, acne, and eczema; bone and tooth conditions such as bone loss, osteoporosis, Paget's disease, Langerhans' cell histiocytosis, periodontal disease, disuse osteopenia, osteomalacia, monostotic fibrous dysplasia, polyostotic fibrous dysplasia, bone metastasis, bone pain management, humoral malignant hypercalcemia, periodontal reconstruction, spinal cord injury, and bone fractures; metabolic conditions such as Gaucher's disease; endocrine conditions such as Cushing's syndrome; and neurological conditions. By “autoimmune diseases” herein include allogenic islet graft rejection, alopecia areata, ankylosing spondylitis, antiphospholipid syndrome, autoimmune Addison's disease, antineutrophil cytoplasmic autoantibodies (ANCA), autoimmune diseases of the adrenal gland, autoimmune hemolytic anemia, autoimmune hepatitis, autoimmune myocarditis, autoimmune neutropenia, autoimmune oophoritis and orchitis, autoimmune thrombocytopenia, autoimmune urticaria, Behcet's disease, bullous pemphigoid, cardiomyopathy, Castleman's syndrome, celiac spruce-dermatitis, chronic fatigue immune disfunction syndrome, chronic inflammatory demyelinating polyneuropathy, Churg-Strauss syndrome, cicatrical pemphigoid, CREST syndrome, cold agglutinin disease, Crohn's disease, dermatomyositis, discoid lupus, essential mixed cryoglobulinemia, factor VIII deficiency, fibromyalgia-fibromyositis, glomerulonephritis, Grave's disease, Guillain-Barre, Goodpasture's syndrome, graft-versus-host disease (GVHD), Hashimoto's thyroiditis, hemophilia A, idiopathic pulmonary fibrosis, idiopathic thrombocytopenia purpura (ITP), IgA neuropathy, IgM polyneuropathies, immune mediated thrombocytopenia, juvenile arthritis, Kawasaki's disease, lichen plantus, lupus erthematosis, Meniere's disease, mixed connective tissue disease, multiple sclerosis, type 1 diabetes mellitus, myasthenia gravis, pemphigus vulgaris, pernicious anemia, polyarteritis nodosa, polychrondritis, polyglandular syndromes, polymyalgia rheumatica, polymyositis and dermatomyositis, primary agammaglobinulinemia, primary biliary cirrhosis, psoriasis, psoriatic arthritis, Reynauld's phenomenon, Reiter's syndrome, rheumatoid arthritis, sarcoidosis, scleroderma, Sjorgen's syndrome, solid organ transplant rejection, stiff-man syndrome, systemic lupus erythematosus, takayasu arteritis, temporal arteristis/giant cell arteritis, thrombotic thrombocytopenia purpura, ulcerative colitis, uveitis, vasculitides such as dermatitis herpetiformis vasculitis, vitiligo, and Wegner's granulomatosis. By “cancer” and “cancerous” herein refer to or describe the physiological condition in mammals that is typically characterized by unregulated cell growth. Examples of cancer include but are not limited to carcinoma, lymphoma, blastoma, sarcoma (including liposarcoma), neuroendocrine tumors, mesothelioma, schwanoma, meningioma, adenocarcinoma, melanoma, and leukemia or lymphoid malignancies. More particular examples of such cancers include hematologic malignancies, such as Hodgkin's lymphoma; non-Hodgkin's lymphomas (Burkitt's lymphoma, small lymphocytic lymphoma/chronic lymphocytic leukemia, mycosis fungoides, mantle cell lymphoma, follicular lymphoma, diffuse large B-cell lymphoma, marginal zone lymphoma, hairy cell leukemia and lymphoplasmacytic leukemia), tumors of lymphocyte precursor cells, including B-cell acute lymphoblastic leukemia/lymphoma, and T-cell acute lymphoblastic leukemia/lymphoma, thymoma, tumors of the mature T and NK cells, including peripheral T-cell leukemias, adult T-cell leukemia/T-cell lymphomas and large granular lymphocytic leukemia, Langerhans cell histocytosis, myeloid neoplasias such as acute myelogenous leukemias, including AML with maturation, AML without differentiation, acute promyelocytic leukemia, acute myelomonocytic leukemia, and acute monocytic leukemias, myelodysplastic syndromes, and chronic myeloproliferative disorders, including chronic myelogenous leukemia; tumors of the central nervous system such as glioma, glioblastoma, neuroblastoma, astrocytoma, medulloblastoma, ependymoma, and retinoblastoma; solid tumors of the head and neck (eg. nasopharyngeal cancer, salivary gland carcinoma, and esophagael cancer), lung (eg. small-cell lung cancer, non-small cell lung cancer, adenocarcinoma of the lung and squamous carcinoma of the lung), digestive system (eg. gastric or stomach cancer including gastrointestinal cancer, cancer of the bile duct or biliary tract, colon cancer, rectal cancer, colorectal cancer, and anal carcinoma), reproductive system (eg. testicular, penile, or prostate cancer, uterine, vaginal, vulval, cervical, ovarian, and endometrial cancer), skin (eg. melanoma, basal cell carcinoma, squamous cell cancer, actinic keratosis), liver (eg. liver cancer, hepatic carcinoma, hepatocellular cancer, and hepatoma), bone (eg. osteoclastoma, and osteolytic bone cancers) additional tissues and organs (eg. pancreatic cancer, bladder cancer, kidney or renal cancer, thyroid cancer, breast cancer, cancer of the peritoneum, and Kaposi's sarcoma), and tumors of the vascular system (eg. angiosarcoma and hemagiopericytoma). By “Fc” or “Fc region”, as used herein is meant the polypeptide comprising the constant region of an antibody excluding the first constant region immunoglobulin domain. Thus Fc refers to the last two constant region immunoglobulin domains of IgA, IgD, and IgG, and the last three constant region immunoglobulin domains of IgE and IgM, and the flexible hinge N-terminal to these domains. For IgA and IgM, Fc may include the J chain. For IgG, as illustrated in FIG. 1, Fc comprises immunoglobulin domains Cgamma2 and Cgamma3 (Cγ2 and Cγ3) and the hinge between Cgamma1 (Cγ1) and Cgamma2 (Cγ2). Although the boundaries of the Fc region may vary, the human IgG heavy chain Fc region is usually defined to comprise residues C226 or P230 to its carboxyl-terminus, wherein the numbering is according to the EU index as in Kabat. Fc may refer to this region in isolation, or this region in the context of an Fc polypeptide, as described below. By “Fc polypeptide” as used herein is meant a polypeptide that comprises all or part of an Fc region. Fc polypeptides include antibodies, Fc fusions, isolated Fc molecules, and Fc fragments. By “Fc fusion” as used herein is meant a protein wherein one or more polypeptides or small molecules is operably linked to an Fc region or a derivative thereof. Fc fusion is herein meant to be synonymous with the terms “immunoadhesin”, “Ig fusion”, “Ig chimera”, and “receptor globulin” (sometimes with dashes) as used in the prior art (Chamow et al., 1996, Trends Biotechnol 14:52-60; Ashkenazi et al., 1997, Curr Opin Immunol 9:195-200). An Fc fusion combines the Fc region of an immunoglobulin with a fusion partner, which in general can be any protein or small molecule. The role of the non-Fc part of an Fc fusion, i.e. the fusion partner, may be to mediate target binding, and thus it is functionally analogous to the variable regions of an antibody. The fusion partner may also play a role as a chemoattractant. Virtually any protein or small molecule may be linked to Fc to generate an Fc fusion. Protein fusion partners may include, but are not limited to, the target-binding region of a receptor, an adhesion molecule, a ligand, an enzyme, a cytokine, a chemokine, or some other protein or protein domain. Small molecule fusion partners may include any therapeutic agent that directs the Fc fusion to a therapeutic target Such targets may be any molecule, preferrably an extracellular receptor, that is implicated in disease. Specific examples of particular drugs that may serve as Fc fusion partners can be found in L. S. Goodman et al., Eds., Goodman and Gilman's The Pharmacological Basis of Therapeutics (McGraw-Hill, New York, ed. 9, 1996). A variety of linkers, defined and described below, may be used to covalently link Fc to a fusion partner to generate an Fc fusion. By “germline” as used herein is meant the set of sequences that compose the natural genetic repertoire of a protein, and its associated alleles. By “hit” and grammatical equivalents herein is meant, in the context of the matrix method, that a given peptide is predicted to bind to a given class II MHC allele. In a preferred embodiment, a hit is defined to be a peptide with binding affinity among the top 5%, or 3%, or 1% of binding scores of random peptide sequences. In an alternate embodiment, a hit is defined to be a peptide with a binding affinity that exceeds some threshold, for instance a peptide that is predicted to bind an MHC allele with at least 100 μM or 10 μM or 1 μM affinity. By “immunogenicity” and grammatical equivalents herein is meant the ability of a protein to elicit an immune response, including but not limited to production of neutralizing and non-neutralizing antibodies, formation of immune complexes, complement activation, mast cell activation, inflammation, and anaphylaxis. By “reduced immunogenicity” and grammatical equivalents herein is meant a decreased ability to activate the immune system, when compared to the wild type protein. For example, a variant protein can be said to have “reduced immunogenicity” if it elicits neutralizing or non-neutralizing antibodies in lower titer or in fewer patients than the wild type protein. In a preferred embodiment, the probability of raising neutralizing antibodies is decreased by at least 5%, with at least 50% or 90% decreases being especially preferred. So, if a wild type produces an immune response in 10% of patients, a variant with reduced immunogenicity would produce an immune response in not more than 9.5% of patients, with less than 5% or less than 1% being especially preferred. A variant protein also can be said to have “reduced immunogenicity” if it shows decreased binding to one or more MHC alleles or if it induces T-cell activation in a decreased fraction of patients relative to the parent protein. In a preferred embodiment, the probability of T-cell activation is decreased by at least 5%, with at least 50% or 90% decreases being especially preferred. By “inflammatory disorders” herein include acute respiratory distress syndrome (ARDS), acute septic arthritis, allergic encephalomyelitis, allergic rhinitis, allergic vasculitis, allergy, asthma, atherosclerosis, chronic inflammation due to chronic bacterial or viral infectionis, chronic obstructive pulmonary disease (COPD), coronary artery disease, encephalitis, inflammatory bowel disease, inflammatory osteolysis, inflammation associated with acute and delayed hypersensitivity reactions, inflammation associated with tumors, peripheral nerve injury or demyelinating diseases, inflammation associated with tissue trauma such as burns and ischemia, inflammation due to meningitis, multiple organ injury syndrome, pulmonary fibrosis, sepsis and septic shock, Stevens-Johnson syndrome, undifferentiated arthropy, and undifferentiated spondyloarthropathy. By “infectious diseases” herein include diseases caused by pathogens such as viruses, bacteria, fungi, protozoa, and parasites. Infectious diseases may be caused by viruses including adenovirus, cytomegalovirus, dengue, Epstein-Barr, hanta, hepatitis A, hepatitis B, hepatitis C, herpes simplex type I, herpes simplex type II, human immunodeficiency virus, (HIV), human papilloma virus (HPV), influenza, measles, mumps, papova virus, polio, respiratory syncytial virus, rinderpest, rhinovirus, rotavirus, rubella, SARS virus, smallpox, viral meningitis, and the like. Infections diseases may also be caused by bacteria including Bacillus antracis, Borrelia burgdorferi, Campylobacter jejuni, Chlamydia trachomatis, Clostridium botulinum, Clostridium tetani, Diptheria, E. coli, Legionella, Helicobacter pylori, Mycobacterium rickettsia, Mycoplasma nesisseria, Pertussis, Pseudomonas aeruginosa, S. pneumonia, Streptococcus, Staphylococcus, Vibria cholerae, Yersinia pestis, and the like. Infectious diseases may also be caused by fungi such as Aspergillus fumigatus, Blastomyces dermatitidis, Candida albicans, Coccidioides immitis, Cryptococcus neoformans, Histoplasma capsulatum, Penicillium marneffei, and the like. Furthermore, infectious diseases may be caused by protozoa and parasites such as chlamydia, kokzidioa, leishmania, malaria, rickettsia, trypanosoma, and the like. By “linker”, “linker sequence”, “spacer”, “tethering sequence” or grammatical equivalents thereof, herein is meant a molecule or group of molecules (such as a monomer or polymer) that connects two molecules and often serves to place the two molecules in a preferred configuration. By “matrix method” and grammatical equivalents thereof herein is meant a method for calculating peptide-MHC affinity in which a matrix is used that contains a score for each possible residue at each position in the peptide, interacting with a given MHC allele. The binding score for a given peptide-MHC interaction is obtained by summing the matrix values for the amino acids observed at each position in the peptide. By “MHC-binding agretopes” and grammatical equivalents herein is meant peptides that are capable of binding to one or more class II MHC alleles with appropriate affinity to enable the formation of MHC-peptide-T-cell receptor complexes and subsequent T-cell activation. MHC-binding agretopes are linear peptide sequences that comprise at least approximately 9 residues. By “parent protein” as used herein is meant a protein that is subsequently modified to generate a variant protein. Said parent protein may be a wild-type or naturally occurring protein from any organism, including but not limited to humans, mice, rats, rabbits, camels, llamas, dromedaries, monkeys, preferably mammals and most preferably humans and mice and rats. Said parent protein may also be a variant or engineered protein, including but not limited to a chimeric antibody, a humanized antibody, or an antibody or Fc fusion obtained using a display technology. “Parent protein” may refer to the protein itself, compositions that comprise the parent protein, or any amino acid sequence that encodes it. Accordingly, “parent protein” as used herein is meant an antibody or Fc fusion protein that is modified to generate a variant antibody or Fc fusion protein. By “patient” herein is meant both humans and other animals, particularly mammals, and organisms. Thus the methods are applicable to both human therapy and veterinary applications. In the preferred embodiment the patient is a mammal, and in the most preferred embodiment the patient is human. By “position” as used herein is meant a location in the sequence of a protein. Positions may be numbered sequentially, or according to an established format, for example the EU index (Kabat et al., 1991, Sequences of Proteins of Immunological Interest, 5th Ed., United States Public Health Svice, National Institutes of Health, Bethesda). For example, position 297 is a position in the human antibody IgG1. Corresponding positions are determined as outlined above, generally through alignment with other parent sequences. By “protein” herein is meant at least two covalently attached amino acids, which includes proteins, polypeptides, oligopeptides and peptides. The protein may be made up of naturally occurring amino acids and peptide bonds, or synthetic peptidomimetic structures, i.e., “analogs” such as peptoids [see Simon et al., Proc. Natl. Acad. Sci. U.S.A. 89(20:9367-71 (1992)], generally depending on the method of synthesis. For example, homo-phenylalanine, citrulline, and noreleucine are considered amino acids for the purposes of the invention. “Amino acid” also includes amino acid residues such as proline and hydroxyproline. Both D- and L-amino acids may be utilized. By “treatment” herein is meant to include therapeutic treatment, as well as prophylactic, or suppressive measures for the disease or disorder. Thus, for example, successful administration of a variant antibodies and Fc fusion proteins protein prior to onset of the disease may result in treatment of the disease. As another example, successful administration of a variant antibodies and Fc fusion proteins protein after clinical manifestation of the disease to combat the symptoms of the disease comprises “treatment” of the disease. “Treatment” also encompasses administration of a variant antibodies and Fc fusion proteins protein after the appearance of the disease in order to eradicate the disease. Successful administration of an agent after onset and after clinical symptoms have developed, with possible abatement of clinical symptoms and perhaps amelioration of the disease, further comprises “treatment” of the disease. Those “in need of treatment” include mammals already having the disease or disorder, as well as those prone to having the disease or disorder, including those in which the disease or disorder is to be prevented. By “variant antibody and Fc fusion protein nucleic acids” and grammatical equivalents herein are meant nucleic acids that encode a variant antibody or Fc fusion protein. Due to the degeneracy of the genetic code, an extremely large number of nucleic acids may be made, all of which encode a variant antibody or Fc fusion protein of the present invention, by simply modifying the sequence of one or more codons in a way which does not change the amino acid sequence of the variant antibody or Fc fusion protein. By “variant antibodies and Fc fusion proteins” and grammatical equivalents thereof herein are meant non-naturally occurring antibodies and Fc fusion proteins which differ from the wild type or parent antibody or Fc fusion protein by at least 1 amino acid insertion, deletion, or substitution. Antibody and Fc fusion protein variants are characterized by the predetermined nature of the variation, a feature that sets them apart from naturally occurring allelic or interspecies variation of antibody and Fc protein sequences. The variant antibodies and Fc fusion proteins may contain insertions, deletions, and/or substitutions at the N-terminus, C-terminus, or internally. In a preferred embodiment, variant antibodies and Fc fusion proteins have at least 1 residue that differs from the naturally occurring antibody or Fc fusion protein sequence, with at least 2, 3, 4, or 5 different residues being more preferred. Variant antibodies and Fc fusion proteins may contain further modifications, for instance mutations that alter stability or solubility or which enable or prevent posttranslational modifications such as PEGylation or glycosylation. Variant antibodies and Fc fusion proteins may be subjected to co- or post-translational modifications, including but not limited to synthetic derivatization of one or more side chains or termini, glycosylation, PEGylation, circular permutation, cyclization, fusion to proteins or protein domains, and addition of peptide tags or labels. By “wild type or wt” and grammatical equivalents thereof herein is meant an amino acid sequence or a nucleotide sequence that is found in nature and includes allelic variations; that is, an amino acid sequence or a nucleotide sequence that has not been intentionally modified. In a preferred embodiment, the wild type sequence is SEQ_ID NO:1.

[0085] Antibody Sequence and Structure

[0086] Antibodies are immunological proteins that bind a specific antigen. In most mammals, including humans and mice, antibodies are constructed from paired heavy and light polypeptide chains. Each chain is made up of individual immunoglobulin (Ig) domains, and thus the generic term immunoglobulin is used for such proteins. Each chain is made up of two distinct regions, referred to as the variable and constant regions. The light and heavy chain variable regions show significant sequence diversity between antibodies, and are responsible for binding the target antigen. The constant regions show less sequence diversity, and are responsible for binding a number of natural proteins to elicit important biochemical events. In humans, there are five different classes of antibodies including IgA (which includes subclasses IgA1 and IgA2), IgD, IgE, IgG (which includes subclasses IgG1, IgG2, IgG3, and IgG4), and IgM. The distinguishing features between these antibody classes are their constant regions, although subtler differences may exist in the V region. FIG. 1 shows an IgG1 antibody, used here as an example to describe the general structural features of immunoglobulins. IgG antibodies are tetrameric proteins composed of two heavy chains and two light chains. The IgG heavy chain is composed of four immunoglobulin domains linked from N- to C-terminus in the order V_{H}-Cγ1-Cγ2-Cγ3, referring to the heavy chain variable domain, constant gamma 1 domain, constant gamma 2 domain, and constant gamma 3 domain respectively. The IgG light chain is composed of two immunoglobulin domains linked from N- to C-terminus in the order V_{L}-C_{L}, referring to the light chain variable domain and the light chain constant domain respectively.

[0087] In certain variations, antibodies are substantially encoded by all or part of the recognized immunoglobulin genes. The recognized immunoglobulin genes, for example in humans, include the kappa (κ), lambda (λ), and heavy chain genetic loci, which together comprise the myriad variable region genes, and the constant region genes mu (μ), delta (δ), gamma (γ), sigma (σ), and alpha (α) which encode the IgM, IgD, IgG, IgE, and IgA isotypes respectively. Exemplary antibodies include full length antibodies and antibody fragments, and may refer to a natural antibody from any organism, an engineered antibody, or an antibody generated recombinantly for experimental, therapeutic, or other purposes as further defined below. Exemplary antibodies also include antibody fragments, as are known in the art, such as Fab, Fab′, F(ab′)₂, Fv, scFv, or other antigen-binding subsequences of antibodies, either produced by the modification of whole antibodies or those synthesized de novo using recombinant DNA technologies. Particularly preferred are full length antibodies that comprise Fc variants as described herein. Antibodies also include monoclonal and polyclonal antibodies. Antibodies can be antagonists, agonists, neutralizing, inhibitory, or stimulatory.

[0088] The variable region of an antibody contains the antigen binding determinants of the molecule, and thus determines the specificity of an antibody for its target antigen. The variable region is so named because it is the most distinct in sequence from other antibodies within the same class. The majority of sequence variability occurs in the complementarity determining regions (CDRs). There are 6 CDRs total, three each per heavy and light chain, designated V_{H} CDR1, V_{H} CDR2, V_{H} CDR3, V_{L} CDR1, V_{L} CDR2, and V_{L} CDR3. The variable region outside of the CDRs is referred to as the framework (FR) region. Although not as diverse as the CDRs, sequence variability does occur in the FR region between different antibodies. Overall, this characteristic architecture of antibodies provides a stable scaffold (the FR region) upon which substantial antigen binding diversity (the CDRs) can be explored by the immune system to obtain specificity for a broad array of antigens. A number of high-resolution structures are available for a variety of variable region fragments from different organisms, some unbound and some in complex with antigen. The sequence and structural features of antibody variable regions are well characterized (Morea et al., 1997, Biophys Chem 68:9-16; Morea et al., 2000, Methods 20:267-279), and the conserved features of antibodies have enabled the development of a wealth of antibody engineering techniques (Maynard et al., 2000, Annu Rev Biomed Eng 2:339-376). For example, it is possible to graft the CDRs from one antibody, for example a murine antibody, onto the framework region of another antibody, for example a human antibody. This process, referred to in the art as “humanization”, enables generation of less immunogenic antibody therapeutics from nonhuman antibodies. Fragments comprising the variable region can exist in the absence of other regions of the antibody, including for example the antigen binding fragment (Fab) comprising V_{H}-Cγ1 and V_{H}-C_{L}, the variable fragment (Fv) comprising V_{H} and V_{L}, the single chain variable fragment (scFv) comprising V_{H} and V_{L} linked together in the same chain, as well as a variety of other variable region fragments (Little et al., 2000, Immunol Today 21:364-370).

[0089] Identification of MHC-Binding Agretopes in Antibodies and Fc Fusion Proteins

[0090] MHC-binding peptides are obtained from proteins by a process called antigen processing. First, the protein is transported into an antigen presenting cell (APC) by endocytosis or phagocytosis. A variety of proteolytic enzymes then cleave the protein into a number of peptides. These peptides can then be loaded onto class II MHC molecules, and the resulting peptide-MHC complexes are transported to the cell surface. Relatively stable peptide-MHC complexes can be recognized by T-cell receptors that are present on the surface of naïve T cells. This recognition event is required for the initiation of an immune response. Accordingly, blocking the formation of stable peptide-MHC complexes is an effective approach for preventing unwanted immune responses.

[0091] The factors that determine the affinity of peptide-MHC interactions have been characterized using biochemical and structural methods. Peptides bind in an extended conformation bind along a groove in the class II MHC molecule. While peptides that bind class II MHC molecules are typically approximately 13-18 residues long, a nine-residue region is responsible for most of the binding affinity and specificity. The peptide binding groove can be subdivided into “pockets”, commonly named P1 through P9, where each pocket is comprises the set of MHC residues that interacts with a specific residue in the peptide. A number of polymorphic residues face into the peptide-binding groove of the MHC molecule. The identity of the residues lining each of the peptide-binding pockets of each MHC molecule determines its peptide binding specificity. Conversely, the sequence of a peptide determines its affinity for each MHC allele.

[0092] Several methods of identifying MHC-binding agretopes in protein sequences are known in the art and may be used to identify agretopes in antibodies and Fc fusion proteins.

[0093] Sequence-based information can be used to determine a binding score for a given peptide-MHC interaction (see, e.g., Mallios, Bioinformatics 15: 432-439 (1999); Mallios, Bioinformatics 17: p 942-948 (2001); Sturniolo et al. Nature Biotech. 17: 555-561(1999)). It is possible to use structure-based methods in which a given peptide is computationally placed in the peptide-binding groove of a given MHC molecule and the interaction energy is determined (for example, see WO 98/59244 and WO 02/069232). Such methods may be referred to as “threading” methods. Alternatively, purely experimental methods can be used; for example a set of overlapping peptides derived from the protein of interest can be experimentally tested for the ability to induce T-cell activation and/or other aspects of an immune response. (see, e.g., WO 02/77187).

[0094] In a preferred embodiment, MHC-binding propensity scores are calculated for each 9-residue frame along the antibodies and Fc fusion proteins sequence using a matrix method (see Sturniolo et al., supra; Marshall et al., J. Immunol. 154: 5927-5933 (1995), and Hammer et al., J. Exp. Med. 180: 2353-2358 (1994)). It is also possible to consider scores for only a subset of these residues, or to consider also the identities of the peptide residues before and after the 9-residue frame of interest. The matrix comprises binding scores for specific amino acids interacting with the peptide binding pockets in different human class II MHC molecule. In the most preferred embodiment, the scores in the matrix are obtained from experimental peptide binding studies. In an alternate preferred embodiment, scores for a given amino acid binding to a given pocket are extrapolated from experimentally characterized alleles to additional alleles with identical or similar residues lining that pocket Matrices that are produced by extrapolation are referred to as “virtual matrices”.

[0095] In a preferred embodiment, the matrix method is used to calculate scores for each peptide of interest binding to each allele of interest. Several methods can then be used to determine whether a given peptide will bind with significant affinity to a given MHC allele. In one embodiment, the binding score for the peptide of interest is compared with the binding propensity scores of a large set of reference peptides. Peptides whose binding propensity scores are large compared to the reference peptides are likely to bind MHC and may be classified as “hits”. For example, if the binding propensity score is among the highest 1% of possible binding scores for that allele, it may be scored as a “hit” at the 1% threshold. The total number of hits at one or more threshold values is calculated for each peptide. In some cases, the binding score may directly correspond with a predicted binding affinity. Then, a hit may be defined as a peptide predicted to bind with at least 100 μM or 10 μM or 1 μM affinity.

[0096] In a preferred embodiment, the number of hits for each nine-mer frame in the protein is calculated using one or more threshold values ranging from 0.5% to 10%. In an especially preferred embodiment, the number of hits is calculated using 1%, 3%, and 5% thresholds.

[0097] In a preferred embodiment, MHC-binding agretopes are identified as the nine-mer frames that bind to several class II MHC alleles. In an especially preferred embodiment, MHC-binding agretopes are predicted to bind at least 10 alleles at 5% threshold and/or at least 5 alleles at 1% threshold. Such nine-mer frames may be especially likely to elicit an immune response in many members of the human population.

[0098] In a preferred embodiment, MHC-binding agretopes are predicted to bind MHC alleles that are present in at least 0.01-10% of the human population. Alternatively, to treat conditions that are linked to specific class II MHC alleles, MHC-binding agretopes are predicted to bind MHC alleles that are present in at least 0.01-10% of the relevant patient population.

[0099] Data about the prevalence of different MHC alleles in different ethnic and racial groups has been acquired by groups such as the National Marrow Donor Program (NMDP); for example see Mignot et al. Am. J. Hum. Genet 68: 686-699 (2001), Southwood et al. J. Immunol. 160: 3363-3373 (1998), Hurley et al. Bone Marrow Transplantation 25: 136-137 (2000), Sintasath Hum. Immunol. 60: 1001 (1999), Collins et al. Tissue Antigens 55: 48 (2000), Tang et al. Hum. Immunol. 63: 221 (2002), Chen et al. Hum. Immunol. 63: 665 (2002), Tang et al. Hum. Immunol. 61: 820 (2000), Gans et al. Tissue Antigens 59: 364-369, and Baldassarre et al. Tissue Antigens 61: 249-252 (2003).

[0100] In a preferred embodiment, MHC binding agretopes are predicted for MHC heterodimers comprising highly prevalent MHC alleles. Class II MHC alleles that are present in at least 10% of the US population include but are not limited to: DPA1*0103, DPA1*0201, DPB1*0201, DPB1*0401, DPB1*0402, DQA1*0101, DQA1*0102, DQA1*0201, DQA1*0501, DQB1*0201, DQB1*0202, DQB1*0301, DQB1*0302, DQB1*0501, DQB1*0602, DRA*0101, DRB1*0701, DRB1*1501, DRB1*0301, DRB1*0101, DRB1*1101, DRB1*1301, DRB3*0101, DRB3*0202, DRB4*0101, DRB4*0103, and DRB5*0101.

[0101] In a preferred embodiment, MHC binding agretopes are also predicted for MHC heterodimers comprising moderately prevalent MHC alleles. Class II MHC alleles that are present in 1% to 10% of the US population include but are not limited to: DPA1*0104, DPA1*0302, DPA1*0301, DPB1*0101, DPB1*0202, DPB1*0301, DPB1*0501, DPB1*0601, DPB1*0901, DPB1*1001, DPB1*1101, DPB1*1301, DPB1*1401, DPB1*1501, DPB1*1701, DPB1*1901, DPB1*2001, DQA1*0103, DQA1*0104, DQA1*0301, DQA1*0302, DQA1*0401, DQB1*0303, DQB1*0402, DQB1*0502, DQB1*0503, DQB1*0601, DQB1*0603, DRB1*1302, DRB1*0404, DRB1*0801, DRB1*0102, DRB1*1401, DRB1*1104, DRB1*1201, DRB1*1503, DRB1*0901, DRB1*1601, DRB1*0407, DRB1*1001, DRB1*1303, DRB1*0103, DRB1*1502, DRB1*0302, DRB1*0405, DRB1*0402, DRB1*1102, DRB1*0803, DRB1*0408, DRB1*1602, DRB1*0403, DRB3*0301, DRB5*0102, and DRB5*0202.

[0102] MHC binding agretopes may also be predicted for MHC heterodimers comprising less prevalent alleles. Information about MHC alleles in humans and other species can be obtained, for example, from the IMGT/HLA sequence database (.ebi.ac.uk/imgt/hla/).

[0103] MHC binding agretopes may also be predicted for MHC heterodimers comprising less prevalent alleles. Information about MHC alleles in humans and other species can be obtained, for example, from the IMGT/HLA sequence database (.ebi.ac.uk/imgt/hla/).

[0104] In an especially preferred embodiment, an immunogenicity score is determined for each peptide, wherein said score depends on the fraction of the population with one or more MHC alleles that are hit at multiple thresholds. For example, the equation
IScore=N(W₁P₁+W₃P₃+W₅P₅)
may be used, where P₁ is the percent of the population hit at 1%, P₃ is the percent of the population hit at 3%, P₅ is the percent of the population hit at 5%, each W is a weighting factor, and N is a normalization factor. In a preferred embodiment, W₁=10, W₃=5, W₅=2, and N is selected so that possible scores range from 0 to 100. In this embodiment, agretopes with IScore greater than or equal to 10 are preferred and agretopes with IScore greater than or equal to 25 are especially preferred.

[0105] In an additional preferred embodiment, MHC-binding agretopes are identified as the nine-mer frames that are located among “nested” agretopes, or overlapping 9-residue frames that are each predicted to bind a significant number of alleles. Such sequences may be especially likely to elicit an immune response.

[0106] Preferred MHC-binding agretopes are those agretopes that are predicted to bind, at a 3% threshold, to MHC alleles that are present in at least 5% of the population. Preferred MHC-binding agretopes in the constant regions of human IgG1, IgG2, IgG3, and IgG4 include, but are not limited to, agretope 5 (residues 149-157, IgG1, IgG2, IgG3, and IgG4), agretope 7 (residues 174-182, IgG1, IgG2, IgG3, and IgG4), agretope 8 (residues 179-187, IgG1, IgG2, IgG3, and IgG4), agretope 9 (residues 180-188, IgG1, IgG2, IgG3, and IgG4), agretope 10 (residues 182-190, IgG1, IgG2, IgG3, and IgG4), agretope 11a (residues 185-193, IgG1, IgG3, and IgG4), agretope 11b (residues 185-193, IgG2), agretope 13 (residues 215-221, IgG3), agretope 14 (residues 234-242, IgG4), agretope 16 (residues 251-259, IgG1, IgG2, IgG3, and IgG4), agretope 17b (residues 262-270, IgG4), agretope 18 (residues 277-285, IgG1, IgG2, IgG3, and IgG4), agretope 19a (residues 300-308, IgG1 and IgG4), agretope 19b (residues 300-308, IgG2 and IgG3), agretope 20a (residues 302-310, IgG1, IgG3, and IgG4), agretope 20b (residues 302-310, IgG2), agretope 21a (residues 303-311, IgG1, IgG3, and IgG4), agretope 23 (residues 369-377, IgG1, IgG2, IgG3, and IgG4), agretope 24a (residues 404-412, IgG1 and IgG2), agretope 24b (residues 404-412, IgG4), and agretope 28a (residues 432-440, IgG1, IgG2, and IgG4).

[0107] Especially preferred MHC-binding agretopes are those agretopes that are predicted to bind, at a 1% threshold, to MHC alleles that are present in at least 10% of the population. Especially preferred MHC-binding agretopes in the constant regions of human IgG1, IgG2, IgG3, and IgG4 include, but are not limited to, agretope 5 (residues 149-157, IgG1, IgG2, IgG3, and IgG4), agretope 16 (residues 251-259, IgG1, IgG2, IgG3, and IgG4), agretope 18 (residues 277-285, IgG1, IgG2, IgG3, and IgG4), agretope 19a (residues 300-308, IgG1 and IgG4), agretope 19b (residues 300-308, IgG2 and IgG3), agretope 21a (residues 303-311, IgG1, IgG3, and IgG4), agretope 24a (residues 404-412, IgG1 and IgG2), agretope 24b (residues 404-412, IgG4), and agretope 28a (residues 432-440, IgG1, IgG2, and IgG4).

[0108] Additional especially preferred MHC-binding agretopes are those agretopes whose sequences partially overlap with additional MHC-binding agretopes. Sets of overlapping MHC-binding agretopes in the constant regions of human IgG1, IgG2, IgG3, and IgG4 include, but are not limited to, residues 174-193 (IgG1, IgG2, IgG3, and IgG4), residues 300-310 (IgG2), and residues 300-311 (IgG1, IgG3, and IgG4).

[0109] Alternate preferred MHC-binding agretopes are those agretopes that have IScore greater than or equal to 10 in the constant regions of human IgG1, IgG2, IgG3, and IgG4 include, but are not limited to, agretope 5 (residues 149-157, IgG1, IgG2, IgG3, and IgG4), agretope 7 (residues 174-182, IgG1, IgG2, IgG3, and IgG4), agretope 9 (residues 180-188, IgG1, IgG2, IgG3, and IgG4), agretope 11a (residues 185-193, IgG1, IgG3, and IgG4), agretope 14 (residues 234-242, IgG4), agretope 16 (residues 251-259, IgG1, IgG2, IgG3, and IgG4), agretope 17b (residues 262-270, IgG4), agretope 18 (residues 277-285, IgG1, IgG2, IgG3, and IgG4), agretope 19a (residues 300-308, IgG1 and IgG4), agretope 19b (residues 300-308, IgG2 and IgG3), agretope 20a (residues 302-310, IgG1, IgG3, and IgG4), agretope 20b (residues 302-310, IgG2), agretope 21a (residues 303-311, IgG1, IgG3, and IgG4), agretope 23 (residues 369-377, IgG1, IgG2, IgG3, and IgG4), agretope 24a (residues 404-412, IgG1 and IgG2), agretope 24b (residues 404-412, IgG4), and agretope 28a (residues 432-440, IgG1, IgG2, and IgG4).

[0110] Alternate especially preferred MHC-binding agretopes are those agretopes that have IScore greater than or equal to 25. Preferred MHC-binding agretopes in the constant regions of human IgG1, IgG2, IgG3, and IgG4 include, but are not limited to, agretope 16 (residues 251-259, IgG1, IgG2, IgG3, and IgG4), agretope 19a (residues 300-308, IgG1 and IgG4), agretope 19b (residues 300-308, IgG2 and IgG3), agretope 24a (residues 404-412, IgG1 and IgG2), agretope 24b (residues 404-412, IgG4), and agretope 28a (residues 432-440, IgG1, IgG2, and IgG4).

[0111] Confirmation of MHC-Binding Agretopes

[0112] In a preferred embodiment, the immunogenicity of the above-predicted MHC-binding agretopes is experimentally confirmed by measuring the extent to which peptides comprising each predicted agretope can elicit an immune response. However, it is possible to proceed from agretope prediction to agretope removal without the intermediate step of agretope confirmation.

[0113] Several methods, discussed in more detail below, can be used for experimental confirmation of agretopes. For example, sets of naive T cells and antigen presenting cells from matched donors can be stimulated with a peptide containing an agretope of interest, and T-cell activation can be monitored. It is also possible to first stimulate T cells with the whole protein of interest, and then re-stimulate with peptides derived from the whole protein. If sera are available from patients who have raised an immune response to antibodies and Fc fusion proteins, it is possible to detect mature T cells that respond to specific epitopes. In a preferred embodiment, interferon gamma or IL-5 production by activated T-cells is monitored using Elispot assays, although it is also possible to use other indicators of T-cell activation or proliferation such as tritiated thymidine incorporation or production of other cytokines.

[0114] Design of Active, Less-Immunogenic Variants

[0115] In a preferred embodiment, the above-determined MHC-binding agretopes are replaced with alternate amino acid sequences to generate active variant antibodies and Fc fusion proteins with reduced or eliminated immunogenicity. Alternatively, the MHC-binding agretopes are modified to introduce one or more sites that are susceptible to cleavage during protein processing. If the agretope is cleaved before it binds to a MHC molecule, it will be unable to promote an immune response. There are several possible strategies for integrating methods for identifying less immunogenic sequences with methods for identifying structured and active sequences, including but not limited to those presented below.

[0116] In one embodiment, for one or more nine-mer agretope identified above, one or more possible alternate nine-mer sequences are analyzed for immunogenicity as well as structural and functional compatibility. The preferred alternate nine-mer sequences are then defined as those sequences that have low predicted immunogenicity and a high probability of being structured and active. It is possible to consider only the subset of nine-mer sequences that are most likely to comprise structured, active, less immunogenic variants. For example, it may be unnecessary to consider sequences that comprise highly non-conservative mutations or mutations that increase predicted immunogenicity.

[0117] In a preferred embodiment, less immunogenic variants of each agretope are predicted to bind MHC alleles in a smaller fraction of the population than the wild type agretope. In an especially preferred embodiment, the less immunogenic variant of each agretope is predicted to bind to MHC alleles that are present in not more than 5% of the population, with not more than 1% or 0.1% being most preferred.

[0118] Maximizing Tolerized Human Sequence Content

[0119] To date, the most successful efforts in reducing antibody immunogenicity have been methods such as chimerization and humanization that replace non-human sequence content with human sequence content. However, even fully human antibodies may be immunogenic. This may arise from agretopes located partially or fully in the variable domains, especially the CDRs, as novel sequence diversity may be sampled in these regions. In addition, it is possible that some germline variable domain sequences are not fully tolerized. This may be especially likely for germline sequences that are rarely present in productively rearranged antibodies. Similarly, in Fc fusions, immunogenicity may arise from agretopes located partially or fully in the linker region or at the junction between the Fc and the fusion partner.

[0120] In a preferred embodiment, antibodies and Fc fusion proteins are prepared to maximize abundantly expressed human sequence content. For example, it has been reported that VH 1-3, VH 3-23, VLK A27, VLK 2-1, and VLL 14-7 are frequently found in productively recombined human antibodies (de Wildt et al. 1999 J. Mol. Biol. 285: 895-901; Ignatovich et al. 1999 J. Mol. Biol. 294: 457-465). Accordingly, agretopes in these sequences may be fully tolerized. Engineered antibodies, including antibodies using a consensus sequence for the variable domain frameworks, may be designed such that the only predicted agretopes are those also present in abundance in the endogenous antibody repertoire.

[0121] Substitution Matrices

[0122] In another especially preferred embodiment, substitution matrices or other knowledge-based scoring methods are used to identify alternate sequences that are likely to retain the structure and function of the wild type protein. Such scoring methods can be used to quantify how conservative a given substitution or set of substitutions is. In most cases, conservative mutations do not significantly disrupt the structure and function of proteins (see, e.g., Bowie et al. Science 247: 1306-1310 (1990), Bowie and Sauer Proc. Nat. Acad. Sci. USA 86: 2152-2156 (1989), and Reidhaar-Olson and Sauer Proteins 7: 306-316 (1990)). However, non-conservative mutations can destabilize protein structure and reduce activity (see, e.g., Lim et al. Biochem. 31: 4324-4333 (1992)). Substitution matrices including but not limited to BLOSUM62 provide a quantitative measure of the compatibility between a sequence and a target structure, which can be used to predict non-disruptive substitution mutations (see Topham et al. Prot. Eng. 10: 7-21 (1997)). The use of substitution matrices to design peptides with improved properties has been disclosed; see Adenot et al. J. Mol. Graph. Model. 17: 292-309 (1999).

[0123] Substitution matrices include, but are not limited to, the BLOSUM matrices (Henikoff and Henikoff, Proc. Nat. Acad. Sci. USA 89: 10917 (1992), the PAM matrices, the Dayhoff matrix, and the like. For a review of substitution matrices, see, e.g., Henikoff Curr. Opin. Struct. Biol. 6: 353-360 (1996). It is also possible to construct a substitution matrix based on an alignment of a given protein of interest and its homologs; see, e.g., Henikoff and Henikoff Comput. Appl. Biosci. 12:135-143 (1996).

[0124] In a preferred embodiment, each of the substitution mutations that are considered has a BLOSUM62 score of zero or higher. According to this metric, preferred substitutions include, but are not limited to:

[0125] In addition, it is preferred that the total BLOSUM62 score of an alternate sequence for a nine residue MHC-binding agretope is decreased only modestly when compared to the BLOSUM62 score of the wild type nine residue agretope. In a preferred embodiment, the score of the variant nine mer is at least 50% of the wild type score, with at least 67%, 80% or 90% being especially preferred.

[0126] Alternatively, alternate sequences can be selected that minimize the absolute reduction in BLOSUM score; for example it is preferred that the score decrease for each nine-mer is less than 20, with score decreases of less than about 10 or about 5 being especially preferred. The exact value may be chosen to produce a library of alternate sequences that is experimentally tractable and also sufficiently diverse to encompass a number of active, stable, less immunogenic variants.

[0127] In a preferred embodiment, substitution mutations are preferentially introduced at positions that are substantially solvent exposed. As is known in the art, solvent exposed positions are typically more tolerant of mutation than positions that are located in the core of the protein.

[0128] In a preferred embodiment, substitution mutations are preferentially introduced at positions that are not highly conserved. As is known in the art, positions that are highly conserved among members of a protein family are often important for protein function, stability, or structure, while positions that are not highly conserved often may be modified without significantly impacting the structural or functional properties of the protein.

[0129] Alanine Substitutions

[0130] In an alternate embodiment, one or more alanine substitutions may be made, regardless of whether an alanine substitution is conservative or non-conservative. As is known in the art, incorporation of sufficient alanine substitutions may be used to disrupt intermolecular interactions.

[0131] Residues Critical for the Structure or Function of Antibodies or Fc Fusion Proteins

[0132] In a preferred embodiment, variant nine-mers are selected such that residues that have been or can be identified as especially critical for maintaining the structure or function of antibodies and Fc fusion proteins retain their wild type identity. In alternate embodiments, it may be desirable to produce variant antibodies and Fc fusion proteins that do not retain wild type activity. In such cases, residues that have been identified as critical for function may be specifically targeted for modification.

[0133] The variable region of an antibody contains the antigen binding determinants of the molecule, and thus determines the specificity of an antibody for its target antigen. The most important determinants are the CDRs. For Fc fusions, key functional residues will depend on the fusion partner chosen and may be determined by standard methods known in the art.

[0134] The Fc region of an antibody or Fc fusion protein interacts with a number of Fc receptors and ligands, imparting an array of important functional capabilities referred to as effector functions. One key class of molecules are the Fc gamma receptors (FcγRs). These receptors mediate communication between antibodies and the cellular arm of the immune system (Raghavan et al., 1996, Annu Rev Cell Dev Biol 12:181-220; Ravetch et al., 2001, Annu Rev Immunol 19:275-290). In humans this protein family includes FcγRI (CD64), including isoforms FcγRIa, FcγRIb, and FcγRIc; FcγRII (CD32), including isoforms FcγRIIa (including allotypes H131 and R131), FcγRIIb (including FcγRIIb-1 and FcγRIIb-2), and FcγRIIc; and FcγRIII (CD16), including isoforms FcγRIIIa (including allotypes V158 and F158) and FcγRIIIb (including allotypes FcγRIIIb-NA1 and FcγRIIb-NA2) (Jefferis et al., 2002, Immunol Lett 82:57-65). All FcγRs bind the same region on Fc, at the N-terminal end of the Cγ2 domain and the preceding hinge. This interaction is well characterized structurally (Sondermann et al., 2001, J Mol Biol 309:737-749), and several structures of the human Fc bound to the extracellular domain of human FcγRIIIb have been solved (pdb accession code 1E4K)(Sondermann et al., 2000, Nature 406:267-273.) (pdb accession codes 1IIS and 1IIX)(Radaev et al., 2001, J Biol Chem 276:16469-16477), as well as has the structure of the human IgE Fc/FcεRIα complex (pdb accession code 1 F6A)(Garman et al., 2000, Nature 406:259-266). Antibody or Fc fusion protein residues that mediate (either directly or indirectly) binding to Fc gamma receptors include, but are not limited to, positions 230, 233, 234, 235, 236, 237, 239, 240, 241, 243, 244, 245, 247, 262, 263, 264, 265, 266, 267, 269, 270, 272, 273, 274, 275, 276, 278, 283, 296, 297, 298, 299, 302, 313, 318, 323, 324, 325, 326, 327, 328, 329, 330, 332, and 333.

[0135] An overlapping but separate site on Fc serves as the interface for the complement protein C1q. In the same way that Fc/FcγR binding mediates ADCC, Fc/C1q binding mediates complement dependent cytotoxicity (CDC). C1q forms a complex with the serine proteases C1r and C1s to form the C1 complex. C1q is capable of binding six antibodies, although binding to two IgGs is sufficient to activate the complement cascade. There is currently no structure available for the Fc/C1q complex; however, mutagenesis studies have mapped the binding site on human IgG for C1q to a region involving residues D270, K322, K326, P329, and P331, and E333 (Idusogie et al., 2000, J Immunol 164:4178-4184; Idusogie et al., 2001, J Immunol 166:2571-2575). Additional residues that may mediate C1q binding include, but are not limited to, L234 and L235.

[0136] A site on Fc between the Cγ2 and Cγ3 domains mediates interaction with the neonatal receptor FcRn, the binding of which recycles endocytosed antibody from the endosome back to the bloodstream (Raghavan et al., 1996, Annu Rev Cell Dev Biol 12:181-220; Ghetie et al., 2000, Annu Rev Immunol 18:739-766). This process, coupled with preclusion of kidney filtration due to the large size of the full length molecule, results in favorable antibody serum half-lives ranging from one to three weeks. Binding of Fc to FcRn also plays a key role in antibody transport. The binding site for FcRn on Fc is also the site at which the bacterial proteins A and G bind. The tight binding by these proteins is typically exploited as a means to purify antibodies by employing protein A or protein G affinity chromatography during protein purification. Thus the fidelity of this region on Fc is important for both the clinical properties of antibodies and their purification. Available structures of the rat Fc/FcRn complex (Martin et al., 2001, Mol Cell 7:867-877), and of the complexes of Fc with proteins A and G (Deisenhofer, 1981, Biochemistry 20:2361-2370; Sauer-Eriksson et al., 1995, Structure 3:265-278; Tashiro et al., 1995, Curr Opin Struct Biol 5:471-481) provide insight into the interaction of Fc with these proteins. Residues that may mediate FcRn binding include, but are not limited to, K248, D249, T250, L251, M252, I253, S254, R255, T256, P257, N286, K288, T307, L309, H310, Q311, L314, D315, E430, H433, N434, H435, and Y436.

[0137] A key feature of the Fc region is the conserved N-linked glycosylation that occurs at N297. This carbohydrate, or oligosaccharide as it is sometimes referred, plays a critical structural and functional role for the antibody, and is one of the principle reasons that antibodies must be produced using mammalian expression systems. While not wanting to be limited to one theory, it is believed that the structural purpose of this carbohydrate may be to stabilize or solubilize Fc, determine a specific angle or level of flexibility between the Cγ3 and Cγ2 domains, keep the two Cγ2 domains from aggregating with one another across the central axis, or a combination of these. Efficient Fc binding to FcγR and C1q requires this modification, and alterations in the composition of the N297 carbohydrate or its elimination affect binding to these proteins (Umaña et al., 1999, Nat Biotechnol 17:176-180; Davies et al., 2001, Biotechnol Bioeng 74:288-294; Mimura et al., 2001, J Biol Chem 276:45539-45547.; Radaev et al., 2001, J Biol Chem 276:16478-16483; Shields et al., 2001, J Biol Chem 276:6591-6604; Shields et al., 2002, J Biol Chem 277:26733-26740; Simmons et al., 2002, J Immunol Methods 263:133-147). Yet the carbohydrate makes little if any specific contact with FcγRs (Radaev et al., 2001, J Biol Chem 276:16469-16477), indicating that the functional role of the N297 carbohydrate in mediating Fc/FcγR binding may be via the structural role it plays in determining the Fc conformation. This is supported by a collection of crystal structures of four different Fc glycoforms, which show that the composition of the oligosaccharide impacts the conformation of Cγ2 and as a result the Fc/FcγR interface (Krapp et al., 2003, J Mol Biol 325:979-989).

[0138] Protein Design Methods

[0139] Protein design methods and MHC agretope identification methods may be used together to identify stable, active, and minimally immunogenic protein sequences (see WO03/006154). The combination of approaches provides significant advantages over the prior art for immunogenicity reduction, as most of the reduced immunogenicity sequences identified using other techniques fail to retain sufficient activity and stability to serve as therapeutics.

[0140] Protein design methods may identify non-conservative or unexpected mutations that nonetheless confer desired functional properties and reduced immunogenicity, as well as identifying conservative mutations. Nonconservative mutations are defined herein to be all substitutions not included in FIG. 5 above; nonconservative mutations also include mutations that are unexpected in a given structural context, such as mutations to hydrophobic residues at the protein surface and mutations to polar residues in the protein core.

[0141] Furthermore, protein design methods may identify compensatory mutations. For example, if a given first mutation that is introduced to reduce immunogenicity also decreases stability or activity, protein design methods may be used to find one or more additional mutations that serve to recover stability and activity while retaining reduced immunogenicity. Similarly, protein design methods may identify sets of two or more mutations that together confer reduced immunogenicity and retained activity and stability, even in cases where one or more of the mutations, in isolation, fails to confer desired properties.

[0142] A wide variety of methods is known for generating and evaluating sequences. These include, but are not limited to, sequence profiling (Bowie and Eisenberg, Science 253(5016): 164-70, (1991)), residue pair potentials (Jones, Protein Science 3: 567-574, (1994)), and rotamer library selections (Dahiyat and Mayo, Protein Sci 5(5): 895-903 (1996); Dahiyat and Mayo, Science 278(5335): 82-7 (1997); Desjarlais and Handel, Protein Science 4: 2006-2018 (1995); Harbury et al, PNAS USA 92(18): 8408-8412 (1995); Kono et al., Proteins: Structure, Function and Genetics 19: 244-255 (1994); Hellinga and Richards, PNAS USA 91: 5803-5807 (1994)).

[0143] Protein Design Automation® (PDA®) Technology

[0144] In an especially preferred embodiment, rational design of improved CD40L variants is achieved by using Protein Design Automation® (PDA®) technology. (See U.S. Pat. Nos. 6,188,965; 6,269,312; 6,403,312; 6,708,120; 6,801,861; 6,804,611; 6,972,356; WO98/47089 and U.S. Ser. Nos. 09/652,699; 09/866,511; 09/990,769; 09/812,034; 09/877,695; 10/057,552; 10/071,859; 10/888,748; 09/782,004; 09/927,790; 10/218,102; 10/218,102; 10/666,311; 10/666,307; and 60/602,546, filed Aug. 17, 2004, all references expressly incorporated herein in their entirety.)

[0145] PDA® technology couples computational design algorithms that generate quality sequence diversity with experimental high-throughput screening to discover proteins with improved properties. The computational component uses atomic level scoring functions, side chain rotamer sampling, and advanced optimization methods to accurately capture the relationships between protein sequence, structure, and function. Calculations begin with the three-dimensional structure of the protein and a strategy to optimize one or more properties of the protein. PDA® technology then explores the sequence space comprising all pertinent amino acids (including unnatural amino acids, if desired) at the positions targeted for design. This is accomplished by sampling conformational states of allowed amino acids and scoring them using a parameterized and experimentally validated function that describes the physical and chemical forces governing protein structure. Powerful combinatorial search algorithms are then used to search through the initial sequence space, which may constitute 10⁵⁰ sequences or more, and quickly return a tractable number of sequences that are predicted to satisfy the design criteria. Useful modes of the technology span from combinatorial sequence design to prioritized selection of optimal single site substitutions. PDA® technology has been applied to numerous systems including important pharmaceutical and industrial proteins and has a demonstrated record of success in protein optimization.

[0146] PDA® utilizes three-dimensional structural information. In a most preferred embodiment, the structure of antibodies and Fc fusion proteins is determined using X-ray crystallography or NMR methods, which are well known in the art. Numerous high resolution structures of antibodies and Fc fusions have been determined, both in isolation and bound to various antigens and effector molecules. Relevant structures include but are not limited to PDB ascession codes 1CE1, 1FVE, and 1L7I (humanized Fab); 1DN2 (human IgG1 Fc); 1E4K, 1IIS and 1IIX (human Fc bound to the extracellular domain of human FcγRIIIb; and 1F6A (human IgE Fc/FcεRIα complex).

[0147] In a preferred embodiment, the results of matrix method calculations are used to identify which of the 9 amino acid positions within the agretope(s) contribute most to the overall binding propensities for each particular allele “hit”. This analysis considers which positions (P1-P9) are occupied by amino acids which consistently make a significant contribution to MHC binding affinity for the alleles scoring above the threshold values. Matrix method calculations are then used to identify amino acid substitutions at said positions that would decrease or eliminate predicted immunogenicity and PDA® technology is used to determine which of the alternate sequences with reduced or eliminated immunogenicity are compatible with maintaining the structure and function of the protein.

[0148] In an alternate preferred embodiment, the residues in each agretope are first analyzed by one skilled in the art to identify alternate residues that are potentially compatible with maintaining the structure and function of the protein. Then, the set of resulting sequences are computationally screened to identify the least immunogenic variants. Finally, each of the less immunogenic sequences are analyzed more thoroughly in PDA® technology protein design calculations to identify protein sequences that maintain the protein structure and function and decrease immunogenicity.

[0149] In an alternate preferred embodiment, each residue that contributes significantly to the MHC binding affinity of an agretope is analyzed to identify a subset of amino acid substitutions that are potentially compatible with maintaining the structure and function of the protein. This step may be performed in several ways, including PDA® calculations or visual inspection by one skilled in the art. Sequences may be generated that contain all possible combinations of amino acids that were selected for consideration at each position. Matrix method calculations can be used to determine the immunogenicity of each sequence. The results can be analyzed to identify sequences that have significantly decreased immunogenicity. Additional PDA® calculations may be performed to determine which of the minimally immunogenic sequences are compatible with maintaining the structure and function of the protein.

[0150] In an alternate preferred embodiment, pseudo-energy terms derived from the peptide binding propensity matrices are incorporated directly into the PDA® technology calculations. In this way, it is possible to select sequences that are active and less immunogenic in a single computational step.

[0151] Combining Immunogenicity Reduction Strategies

[0152] In a preferred embodiment, more than one method is used to generate variant proteins with desired functional and immunological properties. For example, substitution matrices may be used in combination with PDA® technology calculations. Strategies for immunogenicity reduction include, but are not limited to, those described in U.S. Ser. Nos. 09/903,378; 10/039,170; 10/339,788; 10/638,995; and 10/754,296.

[0153] In a preferred embodiment, a variant protein with reduced binding affinity for one or more class II MHC alleles is further engineered to confer improved solubility. As protein aggregation may contribute to unwanted immune responses, increasing protein solubility may reduce immunogenicity. See for example, U.S. Ser. Nos. 09/903,378; 10/039,170; 10/339,788; 10/638,995; and 10/754,296.

[0154] In a further preferred embodiment, an antibody remastering approach is used to mimimize the presence of non-human linear and tertiary epitopes (see, e.g., U.S. Ser. No. 11/004,590. filed Dec. 3, 2004, Ser. No. 10/______, filed Dec. 6, 2004, and entitled Methods Of Generating Variant Proteins With Increased Host String Content And Compositions Thereof).

[0155] In an additional preferred embodiment, a variant protein with reduced binding affinity for one or more class II MHC alleles is further modified by derivatization with PEG or another molecule. As is known in the art, PEG may sterically interfere with antibody binding or improve protein solubility, thereby reducing immunogenicity. In an especially preferred embodiment, rational PEGylation methods are used. See for example, U.S. Ser. Nos. 10/811,492 and 10/820,466.

[0156] In a preferred embodiment, PDA® technology and matrix method calculations are used to remove more than one MHC-binding agretope from a protein of interest.

[0157] Optimization of Additional Factors

[0158] The antibodies and Fc fusion proteins of the invention may be further modified to confer additional desired properties. For example, modifications may be made to provide altered or optimized effector functions, including but not limited to ADCC, ADCP, and CDC, optimized pharmacokinetics including serum half-life and bioavailability, improved affinity or specificity for the target antigen, enhanced stability and solubility (including resistance to proteolysis, deamidation, oxidation, methylation, and hydroxylation), increased expression yield, and the like. Additional modifications include modifications that remove or reduce the ability of heavy chains to form inter-chain disulfide linkages, modifications that alter oligomerization state, and substitutions that enable site-specific covalent modification.

[0159] Generating the Variants

[0160] Variant antibodies and Fc fusion proteins of the invention and nucleic acids encoding them may be produced using a number of methods known in the art.

[0161] Preparing Nucleic Acids

[0162] In one embodiment of the present invention, the library sequences are used to create nucleic acids that encode the member sequences, and that may then be cloned into host cells, expressed and assayed, if desired. Thus, nucleic acids, and particularly DNA, may be made that encode each member protein sequence. These practices are carried out using well-known procedures. For example, a variety of methods that may find use in the present invention are described in Molecular Cloning—A Laboratory Manual, 3^{rd} Ed. (Maniatis, Cold Spring Harbor Laboratory Press, New York, 2001), and Current Protocols in Molecular Biology (John Wiley & Sons).

[0163] As will be appreciated by those skilled in the art, the generation of exact sequences for a library comprising a large number of sequences is potentially expensive and time consuming. Accordingly, there are a variety of techniques that may be used to efficiently generate libraries of the present invention. Such methods that may find use in the present invention are described or referenced in U.S. Pat. No. 6,403,312; U.S. Ser. No. 09/782,004; U.S. Ser. No. 09/927,790; U.S. Ser. No. 10/218,102; PCT WO 01/40091; and PCT WO 02/25588. Such methods include but are not limited to gene assembly methods, PCR-based method and methods which use variations of PCR, ligase chain reaction-based methods, pooled oligo methods such as those used in synthetic shuffling, error-prone amplification methods and methods which use oligos with random mutations, classical site-directed mutagenesis methods, cassette mutagenesis, and other amplification and gene synthesis methods. As is known in the art, there are a variety of commercially available kits and methods for gene assembly, mutagenesis, vector subcloning, and the like, and such commercial products find use in the present invention for generating nucleic acids that encode the variant antibodies or Fc fusion proteins.

[0164] Expression Vectors

[0165] The nucleic acids that encode the antibodies or Fc fusion protein variants of the present invention may be incorporated into an expression vector in order to express the protein. A variety of expression vectors may be utilized for protein expression. Expression vectors may comprise self-replicating extra-chromosomal vectors or vectors which integrate into a host genome. Expression vectors are constructed to be compatible with the host cell type. Thus, expression vectors that find use in the present invention include but are not limited to those which enable protein expression in mammalian cells, bacteria, insect cells, yeast, and in in vitro systems. As is known in the art, a variety of expression vectors are available, commercially or otherwise, that may find use in the present invention for expressing Fc variant proteins.

[0166] Expression vectors typically comprise a protein operably linked with control or regulatory sequences, selectable markers, any fusion partners, and/or additional elements. By “operably linked” herein is meant that the nucleic acid is placed into a functional relationship with another nucleic acid sequence. Generally, these expression vectors include transcriptional and translational regulatory nucleic acid operably linked to the nucleic acid encoding the antibody or Fc fusion protein variant, and are typically appropriate to the host cell used to express the protein. In general, the transcriptional and translational regulatory sequences may include promoter sequences, ribosomal binding sites, transcriptional start and stop sequences, translational start and stop sequences, and enhancer or activator sequences. As is also known in the art, expression vectors typically contain a selection gene or marker to allow the selection of transformed host cells containing the expression vector. Selection genes are well known in the art and will vary with the host cell used.

[0167] Tags and Fusions that Facilitate Protein Production

[0168] Antibody or Fc fusion protein variants may be operably linked to a fusion partner to enable targeting of the expressed protein, purification, screening, display, and the like. Fusion partners may be linked to the antibody or Fc fusion protein variant sequence via a linker sequences. The linker sequence will generally comprise a small number of amino acids, typically less than ten, although longer linkers may also be used. Typically, linker sequences are selected to be flexible and resistant to degradation. As will be appreciated by those skilled in the art, any of a wide variety of sequences may be used as linkers. For example, a common linker sequence comprises the amino acid sequence GGGGS. (SEQ ID NO: 1938)

[0169] A fusion partner may be a targeting or signal sequence that directs the antibody or Fc fusion protein to a desired cellular location or to the extracellular media. As is known in the art, certain signaling sequences may target a protein to be either secreted into the growth media, or into the periplasmic space, located between the inner and outer membrane of the cell.

[0170] A fusion partner may also be a sequence that encodes a peptide or protein that enables purification and/or screening. Such fusion partners include but are not limited to polyhistidine tags (His-tags) (for example H₆ and H₁₀ or other tags for use with Immobilized Metal Affinity Chromatography (IMAC) systems (e.g. Ni⁺² affinity columns)), GST fusions, MBP fusions, Strep-tag, the BSP biotinylation target sequence of the bacterial enzyme BirA, and epitope tags which are targeted by antibodies (for example c-myc tags, flag-tags, and the like). As will be appreciated by those skilled in the art, such tags may be useful for purification, for screening, or both. For example, an antibody or Fc fusion protein variant may be purified using a His-tag by immobilizing it to a Ni⁺² affinity column, and then after purification the same His-tag may be used to immobilize the antibody to a Ni⁺² coated plate to perform an ELISA or other binding assay (as described below).

[0171] A fusion partner may enable the use of a selection method to screen antibody or Fc fusion protein variants (see below). Fusion partners that enable a variety of selection methods are well-known in the art, and all of these find use in the present invention. For example, by fusing the members of an Fc variant library to the gene III protein, phage display can be employed (Kay et al., Phage display of peptides and proteins: a laboratory manual, Academic Press, San Diego, Calif., 1996; Lowman et al., 1991, Biochemistry 30:10832-10838; Smith, 1985, Science 228:1315-1317).

[0172] Fusion partners may enable antibody or Fc fusion protein variants to be labeled. Alternatively, a fusion partner may bind to a specific sequence on the expression vector, enabling the fusion partner and associated antibody or Fc fusion protein variant to be linked covalently or noncovalently with the nucleic acid that encodes them. For example, U.S. Ser. No. 09/642,574; U.S. Ser. No. 10/080,376; U.S. Ser. No. 09/792,630; U.S. Ser. No. 10/023,208; U.S. Ser. No. 09/792,626; U.S. Ser. No. 10/082,671; U.S. Ser. No. 09/953,351; U.S. Ser. No. 10/097,100; U.S. Ser. No. 60/366,658; PCT WO 00/22906; PCT WO 01/49058; PCT WO 02/04852; PCT WO 02/04853; PCT WO 02/08023; PCT WO 01/28702; and PCT WO 02/07466 describe such a fusion partner and technique that may find use in the present invention.

[0173] Transfection

[0174] The methods of introducing exogenous nucleic acid into host cells are well known in the art, and will vary with the host cell used. Techniques include but are not limited to dextran-mediated transfection, calcium phosphate precipitation, calcium chloride treatment, polybrene mediated transfection, protoplast fusion, electroporation, viral or phage infection, encapsulation of the polynucleotide(s) in liposomes, and direct microinjection of the DNA into nuclei. In the case of mammalian cells, transfection may be either transient or stable.

[0175] Expression

[0176] The Fc variants of the present invention may be produced by culturing a host cell transformed with nucleic acid, preferably an expression vector, containing nucleic acid encoding the Fc variants, under the appropriate conditions to induce or cause expression of the protein. The conditions appropriate for expression will vary with the choice of the expression vector and the host cell, and will be easily ascertained by one skilled in the art through routine experimentation. A wide variety of appropriate host cells may be used, including but not limited to mammalian cells, bacteria, insect cells, and yeast. For example, a variety of cell lines that may find use in the present invention are described in the ATCC® cell line catalog, available from the American Type Culture Collection.

[0177] In a preferred embodiment, the Fc variants are expressed in mammalian expression systems, including systems in which the expression constructs are introduced into the mammalian cells using virus such as retrovirus or adenovirus. Any mammalian cells may be used, with human, mouse, rat, hamster, and primate cells being particularly preferred. Suitable cells also include known research cells, including but not limited to Jurkat T cells, NIH3T3, CHO, BHK, COS, HEK293, PER C.6, HeLa, Sp2/0, NS0 cells and variants thereof. In an alternately preferred embodiment, library proteins are expressed in bacterial cells. Bacterial expression systems are well known in the art, and include Escherichia coli (E. coli), Bacillus subtilis, Streptococcus cremoris, and Streptococcus lividans. In alternate embodiments, Fc variants are produced in insect cells (e.g. Sf21/Sf9, Trichoplusia ni Bti-Tn5b1-4) or yeast cells (e.g. S. cerevisiae, Pichia, etc). In an alternate embodiment, Fc variants are expressed in vitro using cell free translation systems. In vitro translation systems derived from both prokaryotic (e.g. E. coli) and eukaryotic (e.g. wheat germ, rabbit reticulocytes) cells are available and may be chosen based on the expression levels and functional properties of the protein of interest. For example, as appreciated by those skilled in the art, in vitro translation is required for some display technologies, for example ribosome display. In addition, the Fc variants may be produced by chemical synthesis methods. Also transgenic expression systems both animal (e.g. cow, sheep or goat milk, embryonated hen's eggs, whole insect larvae, etc.) and plant (e.g. corn, tobacco, duckweed, etc.)

[0178] Purification

[0179] In a preferred embodiment, Fc variant proteins are purified or isolated after expression. Proteins may be isolated or purified in a variety of ways known to those skilled in the art. Standard purification methods include chromatographic techniques, including ion exchange, hydrophobic interaction, affinity, sizing or gel filtration, and reversed-phase, carried out at atmospheric pressure or at high pressure using systems such as FPLC and HPLC. Purification methods also include electrophoretic, immunological, precipitation, dialysis, and chromatofocusing techniques. Ultrafiltration and diafiltration techniques, in conjunction with protein concentration, are also useful.

[0180] As is well known in the art, a variety of natural proteins bind Fc and antibodies, and these proteins can find use in the present invention for purification of Fc variants. For example, the bacterial proteins A and G bind to the Fc region. Likewise, the bacterial protein L binds to the Fab region of some antibodies, as of course does the antibody's target antigen. Purification can often be enabled by a particular fusion partner. For example, antibody or Fc fusion variant proteins may be purified using glutathione resin if a GST fusion is employed, Ni⁺² affinity chromatography if a His-tag is employed, or immobilized anti-flag antibody if a flag-tag is used.

[0181] For general guidance in suitable purification techniques, see Protein Purification: Principles and Practice, 3^{rd} Ed., Scopes, Springer-Verlag, NY, 1994. The degree of purification necessary will vary depending on the screen or use of the antibody or Fc fusion variants. In some instances no purification is necessary. For example in one embodiment, if the antibody or Fc fusion variants are secreted, screening may take place directly from the media. As is well known in the art, some methods of selection do not involve purification of proteins. Thus, for example, if a library of antibody or Fc fusion variants is made into a phage display library, protein purification may not be performed.

[0182] Further Modifications

[0183] The variant antibodies and Fc fusion proteins of the present invention may be subjected to any of a number of non-covalent modifications. Suitable modifications include PEGylation, glycosylation, and the attachment of chemical (e.g. calichemicin, maytansine, trichothene, aurestatin, etc. and/or various radioactive isotopes) or biological toxins (e.g. diphtheria toxin, ricin, abrin) that enhance the ability of the variant to kill target cells.

[0184] Assaying the Activity of the Variants

[0185] The variant antibodies and Fc fusion proteins of the invention may be tested for activity using any of a number of methods, including but not limited to those described below. Antibody or Fc fusion protein variants may be screened using a variety of methods, including but not limited to those that use in vitro assays, in vivo and cell-based assays, and selection technologies. Automation and high-throughput screening technologies may be utilized in the screening procedures.

[0186] Properties of antibody or Fc fusion protein variants that may be screened include but are not limited to stability, solubility, and antigen binding affinity and specificity. Multiple properties may be screened simultaneously or individually. Proteins may be purified or unpurified, depending on the requirements of the assay.

[0187] The biophysical properties of an antibody or Fc fusion variant protein, including but not limited to solubility and overall structural integrity, may be quantitatively or qualitatively determined using a wide range of methods that are known in the art. Methods which may find use in the present invention for characterizing the biophysical properties of an antibody or Fc fusion protein include gel electrophoresis, isoelectric focusing, capillary electrophoresis, chromatography such as size exclusion chromatography, ion-exchange chromatography, and reversed-phase high performance liquid chromatography, peptide mapping, oligosaccharide mapping, mass spectrometry, ultraviolet absorbance spectroscopy, fluorescence spectroscopy, circular dichroism spectroscopy, isothermal titration calorimetry, differential scanning calorimetry, analytical ultra-centrifugation, dynamic light scattering, proteolysis, and cross-linking, turbidity measurement, filter retardation assays, immunological assays, fluorescent dye binding assays, protein-staining assays, microscopy, and detection of aggregates via ELISA or other binding assay. Structural analysis employing X-ray crystallographic techniques and NMR spectroscopy may also find use.

[0188] Binding assays can be carried out using a variety of methods known in the art, including but not limited to FRET (Fluorescence Resonance Energy Transfer) and BRET (Bioluminescence Resonance Energy Transfer)-based assays, AlphaScreen™ (Amplified Luminescent Proximity Homogeneous Assay), Scintillation Proximity Assay, ELISA (Enzyme-Linked Immunosorbent Assay), SPR (Surface Plasmon Resonance, also known as BIACORE®), isothermal titration calorimetry, differential scanning calorimetry, gel electrophoresis, and chromatography including gel filtration. These and other methods may take advantage of some fusion partner or label of the antibody or Fc fusion protein variant. Assays may employ a variety of detection methods including but not limited to chromogenic, fluorescent, luminescent, or isotopic labels.

[0189] In a preferred embodiment, the library is screened using one or more cell-based or in vitro assays. For such assays, cells are treated with one or more antibodies or Fc fusion proteins belonging to a library. Such assays often involve monitoring the response of cells to the antibody or Fc fusion, for example cell survival, cell death, cellular phagocytosis, cell lysis, change in cellular morphology, chemotaxis, or transcriptional activation such as cellular expression of a natural gene or reporter gene.

[0190] Methods for monitoring cell death or viability are known in the art, and include the use of dyes, fluorophores, immunochemical, cytochemical, and radioactive reagents. For example, caspase assays or annexin-flourconjugates may enable apoptosis to be measured, and uptake or release of radioactive substrates (e.g. Chromium-51 release assays) or the metabolic reduction of fluorescent dyes such as alamar blue may enable cell growth, proliferationor activation to be monitored. In a preferred embodiment, the DELFIA® EuTDA-based cytotoxicity assay (Perkin Elmer, MA) is used. Alternatively, dead or damaged target cells may be monitoried by measuring the release of one or more natural intracellular proteins, for example lactate dehydrogenase.

[0191] Transcriptional activation may also serve as a method for assaying function in cell-based assays. In this case, response may be monitored by assaying for natural genes or proteins which may be upregulated or down-regulated, for example the release of certain interleukins may be measured, or alternatively readout may be via a reporter construct such as luciferase or GFP.

[0192] Cell-based assays may also involve the measure of morphological changes of cells as a response to the antibody or Fc fusion protein. Cell types for such assays may be prokaryotic or eukaryotic, and a variety of cell lines that are known in the art may be employed.

[0193] Alternatively, cell-based screens are performed using cells that have been transformed or transfected with nucleic acids encoding the Fc variants. In one embodiment, the cell-based screen utilizes a display method, including but are not limited to phage display (Phage display of peptides and proteins: a laboratory manual, Kay et al., 1996, Academic Press, San Diego, Calif., 1996; Lowman et al., 1991, Biochemistry 30:10832-10838; Smith, 1985, Science 228:1315-1317) and its derivatives, display on bacteria (Georgiou et al., 1997, Nat Biotechnol 15:29-34; Georgiou et al., 1993, Trends Biotechnol 11:6-10; Lee et al., 2000, Nat Biotechnol 18:645-648; Jun et al., 1998, Nat Biotechnol 16:576-80), yeast (Boder & Wittrup, 2000, Methods Enzymol 328:430-44; Boder & Wittrup, 1997, Nat Biotechnol 15:553-557), and mammalian cells (Whitehorn et al., 1995, Bio/technology 13:1215-1219). In an alternate embodiment, periplasmic expression and cytometric screening (Chen et al., 2001, Nat Biotechnol 19: 537-542), the protein fragment complementation assay (Johnsson & Varshavsky, 1994, Proc Natl Acad Sci USA 91:10340-10344.; Pelletier et al, 1998, Proc Nat Acad Sci USA 95:12141-12146), or the yeast two hybrid screen (Fields & Song, 1989, Nature 340:245-246) is used. Additionally, if the antibody or Fc fusion protein may be made to impart a selectable growth or survival advantage to a cell, this property may be used to screen or select for desired antibody or Fc fusion protein variants.

[0194] Determining the Immunogenicity of the Variants

[0195] In a preferred embodiment, the immunogenicity of the antibody and Fc fusion protein variants is determined experimentally to confirm that the variants do have reduced or eliminated immunogenicity relative to the parent protein.

[0196] In a preferred embodiment, ex vivo T-cell activation assays are used to experimentally quantitate immunogenicity. In this method, antigen presenting cells and naive T cells from matched donors are challenged with a peptide or whole protein of interest one or more times. Then, T cell activation can be detected using a number of methods, for example by monitoring production of cytokines or measuring uptake of tritiated thymidine. In the most preferred embodiment, interferon gamma production is monitored using Elispot assays (see Schmittel et al. J. Immunol. Meth., 24: 17-24 (2000)).

[0197] Other suitable T-cell assays include those disclosed in Meidenbauer, et al. Prostate 43, 88-100 (2000); Schultes, B. C and Whiteside, T. L., J. Immunol. Methods 279, 1-15 (2003); and Stickler, et al., J. Immunotherapy, 23, 654-660 (2000).

[0198] In a preferred embodiment, the PBMC donors used for the above-described T-cell activation assays will comprise class II MHC alleles that are common in patients requiring treatment for antibody and Fc fusion protein responsive disorders. For example, for most diseases and disorders, it is desirable to test donors comprising all of the alleles that are prevalent in the population. However, for diseases or disorders that are linked with specific MHC alleles, it may be more appropriate to focus screening on alleles that confer susceptibility to antibody and Fc fusion protein responsive disorders.

[0199] In a preferred embodiment, the MHC haplotype of PBMC donors or patients that raise an immune response to the wild type or variant antibodies and Fc fusion proteins are compared with the MHC haplotype of patients who do not raise a response. This data may be used to guide preclinical and clinical studies as well as aiding in identification of patients who will be especially likely to respond favorably or unfavorably to the antibody or Fc fusion protein therapeutic.

[0200] In an alternate preferred embodiment, immunogenicity is measured in transgenic mouse systems. For example, mice expressing fully or partially human class II MHC molecules may be used.

[0201] In an alternate embodiment, immunogenicity is tested by administering the antibody or Fc fusion protein variants to one or more animals, including rodents and primates, and monitoring for antibody formation. Non-human primates with defined MHC haplotypes may be especially useful, as the sequences and hence peptide binding specificities of the MHC molecules in non-human primates may be very similar to the sequences and peptide binding specificities of humans. Similarly, genetically engineered mouse models expressing human MHC peptide-binding domains may be used (see, e.g., Sonderstrup et al. Immunol. Rev. 172: 335-343 (1999) and Forsthuber et al. J. Immunol. 167: 119-125 (2001)).

[0202] Formulation and Administration to Patients

[0203] Once made, the variant antibodies and Fc fusion proteins and nucleic acids of the invention find use in a number of applications. In a preferred embodiment, the variant antibodies and Fc fusion proteins are administered to a patient to treat an antibody and Fc fusion protein responsive disorder.

[0204] In a preferred embodiment, the variant antibody or Fc fusion protein is used to treat an autoimmune disease, cancer, inflammatory disorder, infectious disease, or other responsive condition. Administration may be therapeutic or prophylactic.

[0205] The pharmaceutical compositions of the present invention comprise a variant antibody or Fc fusion protein in a form suitable for administration to a patient. Formulations of the proteins of the present invention are prepared for storage by mixing the protein having the desired degree of purity with optional pharmaceutically acceptable carriers, excipients or stabilizers (Remington's Pharmaceutical Sciences 16th edition, Osol, A. Ed., 1980), in the form of lyophilized formulations or aqueous solutions. The formulations to be used for in vivo administration are preferably sterile.

[0206] The dosing amounts and frequencies of administration are, in a preferred embodiment, selected to be therapeutically or prophylactically effective. As is known in the art, adjustments for antibody or Fc fusion degradation, systemic versus localized delivery, and rate of new protease synthesis, as well as the age, body weight, general health, sex, diet, time of administration, drug interaction and the severity of the condition may be necessary, and will be ascertainable with routine experimentation by those skilled in the art.

[0207] The concentration of the therapeutically active antibody or Fc fusion of the present invention in the formulation may vary from about 0.1 to 100 weight %. In a preferred embodiment, the concentration of the antibody or Fc fusion is in the range of 0.003 to 1.0 molar. In order to treat a patient, a therapeutically effective dose of the antibody or Fc fusion of the present invention may be administered. By “therapeutically effective dose” herein is meant a dose that produces the effects for which it is administered. The exact dose will depend on the purpose of the treatment, and will be ascertainable by one skilled in the art using known techniques. Dosages may range from 0.0001 to 100 mg/kg of body weight or greater, for example 0.1, 1, 10, or 50 mg/kg of body weight, with 1 to 10 mg/kg being preferred. In some embodiments, only a single dose of the antibody or Fc fusion of the present invention is used. In other embodiments, multiple doses of the antibody or Fc fusion of the present invention are administered. The elapsed time between administrations may be less than 1 hour, about 1 hour, about 1-2 hours, about 2-3 hours, about 3-4 hours, about 6 hours, about 12 hours, about 24 hours, about 48 hours, about 2-4 days, about 4-6 days, about 1 week, about 2 weeks, or more than 2 weeks.

[0208] In other embodiments, the antibodies or Fc fusions of the present invention are administered in metronomic dosing regimes, either by continuous infusion or frequent administration without extended rest periods. Such metronomic administration may involve dosing at constant intervals without rest periods. Typically, such regimens encompass chronic low-dose or continuous infusion for an extended period of time, for example 1-2 days, 1-2 weeks, 1-2 months, or up to 6 months or more. The use of lower doses may minimize side effects and the need for rest periods.

[0209] In certain embodiments the antibody or Fc fusion of the present invention and one or more other prophylactic or therapeutic agents are cyclically administered to the patient. Cycling therapy involves administration of a first agent at one time, a second agent at a second time, optionally additional agents at additional times, optionally a rest period, and then repeating this sequence of administration one or more times. The number of cycles is typically from 2-10. Cycling therapy may reduce the development of resistance to one or more agents, may minimize side effects, or may improve treatment efficacy.

[0210] Methods of Administration

[0211] Administration of the pharmaceutical composition comprising an antibody or Fc fusion of the present invention, preferably in the form of a sterile aqueous solution, may be done in a variety of ways, including, but not limited to orally, subcutaneously, intravenously, intranasally, intraotically, transdermally, topically (e.g., gels, salves, lotions, creams, etc.), intraperitoneally, intramuscularly, intrapulmonary, vaginally, parenterally, rectally, or intraocularly. In some instances, for example for the treatment of wounds, inflammation, etc., the antibody or Fc fusion may be directly applied as a solution or spray. As is known in the art, the pharmaceutical composition may be formulated accordingly depending upon the manner of introduction.

[0212] As is known in the art, antibody therapeutics are often delivered by IV infusion or bolus. The antibodies and Fc fusions of the present invention may also be delivered using such methods. For example, administration may be by intravenous infusion with 0.9% sodium chloride as an infusion vehicle.

[0213] Subcutaneous administration may be preferable in some circumstances because the patient may self-administer the pharmaceutical composition. Many antibody therapeutics are not sufficiently potent to allow for formulation of a therapeutically effective dose in the maximum acceptable volume for subcutaneous administration. This problem may be addressed in part by the use of protein formulations comprising arginine-HCl, histidine, and polysorbate (see WO 04091658).

[0214] Pulmonary delivery may be accomplished using an inhaler or nebulizer and a formulation comprising an aerosolizing agent. For example, AERx® inhalable technology commercially available from Aradigm, or Inhance™ pulmonary delivery system commercially available from Nektar Therapeutics may be used.

[0215] In addition, any of a number of delivery systems are known in the art and may be used to administer the antibodies or Fc fusions of the present invention. Examples include, but are not limited to, encapsulation in liposomes, microparticles, microspheres (eg. PLA/PGA microspheres), and the like. Alternatively, an implant of a porous, non-porous, or gelatinous material, including membranes or fibers, may be used. Sustained release systems may comprise a polymeric material or matrix such as polyesters, hydrogels, poly(vinylalcohol),polylactides, copolymers of L-glutamic acid and ethyl-L-gutamate, ethylene-vinyl acetate, lactic acid-glycolic acid copolymers such as the LUPRON DEPOT®, and poly-D-(−)-3-hydroxyburyric acid.

[0216] In an alternate embodiment, variant antibodies and Fc fusion proteins nucleic acids may be administered; i.e., “gene therapy” approaches may be used. In this embodiment, variant antibodies and Fc fusion proteins nucleic acids are introduced into cells in a patient in order to achieve in vivo synthesis of a therapeutically effective amount of variant antibodies and Fc fusion proteins protein. Variant antibodies and Fc fusion proteins nucleic acids may be introduced using a number of techniques, including but not limited to transfection with liposomes, viral (typically retroviral) vectors, and viral coat protein-liposome mediated transfection [Dzau et al., Trends in Biotechnology 11:205-210 (1993)]. In some situations it is desirable to provide the nucleic acid source with an agent that targets the target cells, such as an antibody specific for a cell surface membrane protein or the target cell, a ligand for a receptor on the target cell, etc. Where liposomes are employed, proteins which bind to a cell surface membrane protein associated with endocytosis may be used for targeting and/or to facilitate uptake, e.g. capsid proteins or fragments thereof tropic for a particular cell type, antibodies for proteins which undergo internalization in cycling, proteins that target intracellular localization and enhance intracellular half-life. The technique of receptor-mediated endocytosis is described, for example, by Wu et al., J. Biol. Chem. 262:4429-4432 (1987); and Wagner et al., Proc. Natl. Acad. Sci. U.S.A. 87:3410-3414 (1990). For review of gene marking and gene therapy protocols see Anderson et al., Science 256:808-813 (1992).

[0217] In all cases, controlled release systems may be used to release the antibody or Fc fusion at or close to the desired location of action.

[0218] Therapeutic Regimen

[0219] The antibodies and Fc fusions of the present invention may be administered as a monotherapy or concomitantly with one or more other therapeutic regimens or agents. The additional therapeutic regimes or agents may be used to improve the efficacy or safety of the antibody or Fc fusion. Also, the additional therapeutic regimes or agents may be used to treat the same disease or a comorbidity rather than to alter the action of the antibody or Fc fusion. For example, an antibody or Fc fusion of the present invention may be administered to the patient along with chemotherapy, radiation therapy, surgery, both chemotherapy and radiation therapy, etc. The antibody or Fc fusion of the present invention may be administered in combination with one or more other prophylactic or therapeutic agents, including but not limited to cytotoxic agents, chemotherapeutic agents, cytokines, growth inhibitory agents, anti-hormonal agents, kinase inhibitors, anti-angiogenic agents, cardioprotectants, immunostimulatory agents, immunosuppressive agents, agents that promote proliferation of hematological cells, angiogenesis inhibitors, protein tyrosine kinase (PTK) inhibitors, additional antibody or Fc fusion proteins, FcγRIIb or other Fc receptor inhibitors, or other therapeutic agents.

[0220] Pharmacogenomics

[0221] Class II MHC molecules are polymorphic in the human population. HLA genotype is a major determinant of susceptibility to specific autoimmune diseases (see, e.g., Nepom Clin. Immunol. Immunopathol. 67: S50-S55 (1993)) and infections (see, e.g., Singh et al. Emerg. Infect. Dis. 3: 41-49 (1997)). Furthermore, the set of MHC alleles present in an individual can affect the efficacy of some vaccines (see, e.g., Cailat-Zucman et al. Kidney Int. 53: 1626-1630 (1998) and Poland et al. Vaccine 20: 430-438 (2001)). For a given patient or population of patients, the likelihood of eliciting an immune response to the antibodies and Fc fusions of the present invention may be affected by the presence or absence of specific class II MHC alleles.

[0222] In a preferred embodiment, class II MHC alleles that are associated with increased or decreased susceptibility to elicit an immune response to an antibody or Fc fusion protein are identified. For example, patients treated with antibody or Fc fusion protein therapeutics may be tested for the presence of antibodies that recognize the therapeutic antibody or Fc fusion protein and then genotyped for class II MHC. Alternatively, T-cell activation assays such as those described above may be conducted using cells derived from a number of genotyped donors. Alleles that confer susceptibility to immunogenicity may be defined as those alleles that are significantly more common in those who elicit an immune response versus those who do not. Similarly, alleles that confer resistance to immunogenicity may be defined as those that are significantly less common in those who do not elicit an immune response versus those that do. It is also possible to use purely computational techniques to identify which alleles are likely to recognize peptides in an antibody or Fc fusion protein therapeutic.

[0223] In a preferred embodiment, the antibodies and Fc fusions of the present invention do not comprise peptides that appreciably bind to any human class II MHC allele. Such therapeutics would be expected to be minimally immunogenic. In an alternate embodiment, the antibodies and Fc fusions of the present invention do not comprise peptides that appreciably bind to any human class II MHC allele that is present in a significant fraction of the relevant patient population. For example, many autoimmune conditions are associated with specific MHC alleles, and therefore the allele frequencies for many autoimmune diseases are different from that of the general population. It is preferred that the antibodies and Fc fusions bind to class II alleles present in less than 10% of patients, with less than 1% or less than 0.1% being especially preferred.

[0224] In a preferred embodiment, the HLA haplotype of patients is determined in order to predict the potential immunogenicity of the antibodies and Fc fusions of the present invention. This information may be used, for example, to select patients to include or exclude from clinical trials or, post-approval, to provide guidance to physicians and patients regarding appropriate dosages and treatment options. In one embodiment, patients are selected for inclusion in clinical trials or post-approval treatment with an antibody of the present invention if their genotype indicates that they are less likely to elicit an immune response to an antibody of the present invention as compared to one or more currently used antibody therapeutics. In another embodiment, appropriate dosages, routes of administration, and treatment regimens are determined using such genotype information.

### EXAMPLES

### Example 1

### Identification of MHC-Binding Agretopes in Human Antibody Sequences

[0225] Matrix method calculations (Sturniolo, supra) were conducted for the constant domains of human IgG1, IgG2, IgG3, and IgG4 sequences of, respectively, SEQ ID NO:1, SEQ ID NO:2, SEQ ID NO:3, and SEQ ID NO:4.

[0226] Agretopes were predicted for the following alleles, each of which is present in at least 1% of the US population: DRB1*0101, DRB1*0102, DRB1*0301, DRB1*0401, DRB1*0402, DRB1*0404, DRB1*0405, DRB1*0408, DRB1*0701, DRB1*0801, DRB1*1101, DRB1*1102, DRB1*1104, DRB1*1301, DRB1*1302, DRB1*1501, and DRB1*1502.

[0227] For each nine-mer that is predicted to bind to at least one allele at a 5% threshold, the number of alleles that are hit at 1%, 3% and 5% thresholds were given, as well as the percent of the US population that are predicted to react to the nine-mer. The worst nine-mers are shown in bold. They are predicted to be immunogenic in at least 10% of the US population, using a 1% threshold.

[0228] Predicted MHC-binding agretopes in the constant domains of IgG1, IgG2, IgG3, and IgG4 are shown in FIG. 6. IScore, the number of alleles hit at 1%, 3%, and 5% thresholds, and the percent of the population hit at 1%, 3%, and 5% thresholds are shown.

[0229] Of special interest are differences among the IgG classes that are predicted to substantially impact immunogenicity. For example, V309 in IgG2 versus L309 in IgG1, IgG3, and IgG4 results in an IScore of 1.5 versus 23 for agretope 21a. Incorporating the L309V substitution into IgG1 substantially decreases MHC binding of one agretope, and does not create any new agretopes or any nine-mers that are not already present in IgG2. Similarly, R435 and F436 in IgG3 versus H435 and Y436 in IgG1, IgG2, and IgG4 results in an IScore of 3.7 for agretope 28b versus an IScore of 36.5 for agretope 28a. Incorporating the H435R/Y436F substitutions into IgG1 substantantially decreases MHC binding for one agretope and does not create any new agretopes or any nine-mers that are not already present in IgG3.

[0230] The allele binding specificity of the above agretopes is shown in FIG. 7 below. DRB1 alleles that are predicted to bind to each agretope at 1%, 3%, and 5% cutoffs are marked with “1”, “3”, or “5”, respectively.

[0231] Heavy chain variable region (VH), lambda light chain variable region (VLL) and kappa light chain variable region (VLK) sequences from the human germline were analyzed to identify MHC-binding agretopes. Sequences are aligned and numbered according to Kabat. “Start” indicates the first residue in the nine-mer agretope. “-” indicates an IScore of exactly 0, while “0” indicates an IScore greater than 0 and less than 0.5.

[0232] FIGS. 8-13 show the IScore of MHC binding agretopes in antibody germline heavy and light chain chain variable regions.

### Example 2

### Identification of Suitable Less Immunogenic Sequences for MHC-Binding Agretopes in Antibodies and Fc Fusion Proteins

[0233] MHC-binding agretopes that were predicted to bind alleles present in at least 10% of the US population, using a 1% threshold, were analyzed to identify suitable less immunogenic variants.

[0234] At each agretope, all possible combinations of amino acid substitutions were considered, with the following requirements: (1) each substitution has a score of 0 or greater in the BLOSUM62 substitution matrix, (2) each substitution is capable of conferring reduced binding to at least one of the MHC alleles considered, and (3) once sufficient substitutions are incorporated to prevent any allele hits at a 1% threshold, no additional substitutions are added to that sequence.

[0235] Alternate sequences were scored for immunogenicity and structural compatibility. Preferred alternate sequences were defined to be those sequences that are not predicted to bind to any of the 17 MHC alleles tested above using a 1% threshold, and that have a total BLOSUM62 score that is at least 80% of the wild type score.

[0236] FIGS. 14-20 show suitable less immunogenic variants of agretope 5 (IgG1,2,3,4 constant region residues 149-157), agretope 16 (IgG1,2,3,4 constant region residues 251-259), agretope 18 (IgG1,2,3,4 constant region residues 277-285), agretope 19a (IgG1,4 constant region residues 300-308), agretope 19b (IgG2,3 constant region residues 300-308), agretope 21a (IgG1,3,4 constant region residues 303-311), agretope 24a (IgG1,2 constant region 404-412), agretope 24b (IgG4 constant region 404-412), and agretope 28a (IgG1,2,4 constant region residues 432-440). B(wt) is the BLOSUM62 score of the wild type nine-mer, I(alt) is the percent of the US population containing one or more MHC alleles that are predicted to bind the alternate nine-mer at a 1% threshold, and B(alt) is the BLOSUM62 score of the alternate nine-mer.

### Example 3

### Identification of Suitable Less Immunogenic Sequences for MHC-Binding Agretopes in Antibodies and Fc Fusion Proteins: PDA® technology

[0237] MHC-binding agretopes that were predicted to bind alleles present in at least 10% of the US population, using a 1% threshold, using PDA® technology to identify suitable less immunogenic variants.

[0238] Each position in the agretopes of interest was analyzed to identify a subset of amino acid substitutions that are potentially compatible with maintaining the structure and function of the protein. PDA® technology calculations were run for each position of each nine-mer agretope and compatible amino acids for each position were saved. In these calculations, side-chains within 5 Angstroms of the position of interest were permitted to change conformation but not amino acid identity. The variant agretopes were then analyzed for immunogenicity. The PDA® energies and IScore values for the wild-type nine-mer agretope were compared to the variants and the subset of variant sequences with lower predicted immunogenicity and PDA® energies within 5.0 kcal/mol of the wild-type (wt) were noted.

[0239] FIGS. 23-30 show suitable less immunogenic variants of agretope 16 (IgG1,2,3,4 constant region residues 251-259), agretope 18 (IgG1,2,3,4 constant region residues 277-285), agretope 19a (IgG1,4 constant region residues 300-308), agretope 19b (IgG2,3 constant region residues 300-308), agretope 21a (IgG1,3,4 constant region residues 303-311), agretope 24a (IgG1,2 constant region residues 404-412), agretope 24b (IgG4 constant region residues 404-412), and agretope 28a (IgG1,2,4 constant region residues 432-440) identified using PDA® technology calculations. In FIGS. 23-30, E(PDA) is the energy determined using PDA® technology calculations compared against the wild-type, IScore: Anchor is the IScore for the agretope, and IScore: Overlap is the sum of the IScores for all of the overlapping agretopes.

### Example 4

### Analysis of Immunogenic Sequences in Fc Variants Engineered for Enhanced Effector Function

[0240] A set of antibodies and Fc fusion proteins variants were engineered for a number of properties, including altered binding to Fc gamma receptors, FcRn, and protein A, as well as function in the absence of glycosylation. MHC binding agretopes in the engineered Fc variants were compared with the MHC binding agretopes in the parent sequence of SEQ. ID. NO. 1.

[0241] Variants that show a decrease in IScore relative to SEQ. ID. NO. 1 for at least one agretope include SEQ. ID. NO. 420, 423, 428, 429, 432, 433, 434, 435, 436, 437, 444, 447, 450, 451, 452, 453, 460, 461, 462, 463, 464, 472, 473, 491, 494, 522, 550, 551, 553, 554, 555, 601, 602, 603, 607, 608, 642, 643, 644, 667, 668, 670, 671, 712, 717, 722, 723, 724, 725, 726, 727, 730, 731, 732, 747, 748, 750, 751, 755, 757, 758, 759, 760, 762, 765, 766, 773, 799, 800, 801, 802, 803, 804, 805, 806, 807, 808, 809, 810, 812, 813, 845, 846, 848, 849, 851, 852, 853, 854, 855, 856, 857, 858, 859, 860, 862, 863, 864, 868, 869, 927, 956, 957, 958, 959, 960, 1077, 1081, 1087, 1088, 1185, 1186, 1190, 1222, 1223, 1238, 1245, 1246, 1247, 1248, 1249, 1250, 1253, 1255, 1282, 1283, 1284, 1285, 1286, 1287, 1288, 1289, 1291, 1294, 1295, 1296, 1318, 1322, 1333, 1337, 1339, 1340, 1341, 1342, 1343, 1345, 1346, 1347, 1348, 1350, 1351, 1560, 1568, 1569,1571, 1572, 1573, and 1574.

[0242] Variants that show an increase in IScore relative to SEQ. ID. NO. 1 for at least one agretope include SEQ. ID. NO. 421, 422, 425, 426, 427, 431, 432, 443, 447, 448, 449, 452, 461, 463, 469, 470, 472, 473, 474, 476, 477, 484, 485, 486, 493, 496, 498, 500, 504, 524, 526, 533, 536, 540, 545, 549, 552, 556, 570, 571, 572, 573, 578, 595, 596, 597, 598, 602, 603, 604, 605, 606, 607, 615, 616, 617, 618, 627, 630, 631, 632, 641, 648, 649, 650, 654, 664, 665, 666, 667, 669, 671, 672, 673, 677, 678, 680, 682, 683, 684, 685, 686, 690, 693, 694, 700, 703, 706, 708, 720, 721, 722, 723, 724, 725, 726, 728, 735, 740, 741, 742, 743, 744, 745, 746, 752, 753, 754, 756, 761, 763, 764, 767, 768, 769, 770, 771, 772, 774, 775, 781, 782, 783, 784, 785, 786, 788, 789, 790, 791, 792, 793, 794, 795, 796, 834, 839, 858, 859, 860, 861, 863, 864, 865, 866, 867, 868, 871, 874, 876, 877, 878, 921, 928, 929, 930, 931, 932, 933, 934, 935, 936, 937, 945, 948, 949, 950, 952, 956, 957, 958, 959, 960, 962, 963, 964, 965, 985, 986, 987, 988, 989, 990, 991, 1016, 1017, 1018, 1037, 1038, 1039, 1041, 1051, 1053, 1067, 1070, 1071, 1072, 1073, 1074, 1079, 1080, 1083, 1085, 1087, 1088, 1092, 1099, 1100, 1101, 1102, 1103, 1104, 1105, 1109, 1112, 1114, 1116, 1127, 1130, 1135, 1136, 1137, 1138, 1139, 1140, 1143, 1144, 1145, 1146, 1148, 1149, 1150, 1151, 1152, 1153, 1154, 1155, 1156, 1157, 1158, 1160, 1162, 1163, 1164, 1165, 1166, 1167, 1168, 1169, 1170, 1171, 1172, 1173, 1174, 1175, 1176, 1187, 1188, 1189, 1190, 1192, 1197, 1208, 1210, 1224, 1225, 1228, 1230, 1233, 1239, 1250, 1251, 1252, 1253, 1254, 1259, 1260, 1270, 1273, 1285, 1288, 1290, 1291, 1292, 1293, 1294, 1295, 1296, 1302, 1309, 1313, 1318, 1322, 1324, 1328, 1333, 1337, 1343, 1344, 1345, 1346, 1347, 1383, 1534, 1535, 1536, 1537, 1538, 1539, 1558, 1559, 1564, 1565, 1568, 1569, and 1570.

[0243] Variants that show no change in IScore relative to SEQ. ID. NO.1 for at least one agretope include SEQ. ID. NO. 424, 430, 438, 439, 440, 441, 442, 445, 446, 454, 455, 456, 457, 458, 459, 465, 466, 467, 468, 471, 475, 478, 479, 480, 481, 482, 483, 487, 488, 489, 490, 492, 495, 497, 499, 501, 502, 503, 505, 506, 507, 508, 509, 510, 511, 512, 513, 514, 515, 516, 517, 518, 519, 520, 521, 523, 525, 527, 528, 529, 530, 531, 532, 534, 535, 537, 538, 539, 541, 542, 543, 544, 546, 547, 548, 557, 558, 559, 560, 561, 562, 563, 564, 565, 566, 567, 568, 569, 574, 575, 576, 577, 579, 580, 581, 582, 583, 584, 585, 586, 587, 588, 589, 590, 591, 592, 593, 594, 599, 600, 609, 610, 611, 612, 613, 614, 619, 620, 621, 622, 623, 624, 625, 626, 628, 629, 633, 634, 635, 636, 637, 638, 639, 640, 645, 646, 647, 651, 652, 653, 655, 656, 657, 658, 659, 660, 661, 662, 663, 674, 675, 676, 679, 681, 687, 688, 689, 691, 692, 695, 696, 697, 698, 699, 701, 702, 704, 705, 707, 709, 710, 711, 713, 714, 715, 716, 718, 719, 729, 733, 734, 736, 737, 738, 739, 749, 776, 777, 778, 779, 780, 787, 797, 798, 811, 814, 815, 816, 817, 818, 819, 820, 821, 822, 823, 824, 825, 826, 827, 828, 829, 830, 831, 832, 833, 835, 836, 837, 838, 840, 841, 842, 843, 844, 847, 850, 870, 872, 873, 875, 879, 880, 881, 882, 883, 884, 885, 886, 887, 888, 889, 890, 891, 892, 893, 894, 895, 896, 897, 898, 899, 900, 901, 902, 903, 904, 905, 906, 907, 908, 909, 910, 911, 912, 913, 914, 915, 916, 917, 918, 919, 920, 922, 923, 924, 925, 926, 938, 939, 940, 941, 942, 943, 944, 946, 947, 951, 953, 954, 955, 961, 966, 967, 968, 969, 970, 971, 972, 973, 974, 975, 976, 977, 978, 979, 980, 981, 982, 983, 984, 992, 993, 994, 995, 996, 997, 998, 999, 1000, 1001, 1002, 1003, 1004, 1005, 1006, 1007, 1008, 1009, 1010, 1011, 1012, 1013, 1014, 1015, 1019, 1020, 1021, 1022, 1023, 1024, 1025, 1026, 1027, 1028, 1029, 1030, 1031, 1032, 1033, 1034, 1035, 1036, 1040, 1042, 1043, 1044, 1045, 1046, 1047, 1048, 1049, 1050, 1052, 1054, 1055, 1056, 1057, 1058, 1059, 1060, 1061, 1062, 1063, 1064, 1065, 1066, 1068, 1069, 1075, 1076, 1078, 1082, 1084, 1086, 1089, 1090, 1091, 1093, 1094, 1095, 1096, 1097, 1098, 1106, 1107, 1108, 1110, 1111, 1113, 1115, 1117, 1118, 1119, 1120, 1121, 1122, 1123, 1124, 1125, 1126, 1128, 1129, 1131, 1132, 1133, 1134, 1141, 1142, 1147, 1159, 1161, 1177, 1178, 1179, 1180, 1181, 1182, 1183, 1184, 1191, 1193, 1194, 1195, 1196, 1198, 1199, 1200, 1201, 1202, 1203, 1204, 1205, 1206, 1207, 1209, 1211, 1212, 1213, 1214, 1215, 1216, 1217, 1218, 1219, 1220, 1221, 1226, 1227, 1229, 1231, 1232, 1234, 1235, 1236, 1237, 1240, 1241, 1242, 1243, 1244, 1256, 1257, 1258, 1261, 1262, 1263, 1264, 1265, 1266, 1267, 1268, 1269, 1271, 1272, 1274, 1275, 1276, 1277, 1278, 1279, 1280, 1281, 1297, 1298, 1299, 1300, 1301, 1303, 1304, 1305, 1306, 1307, 1308, 1310, 1311, 1312, 1314, 1315, 1316, 1317, 1319, 1320, 1321, 1323, 1325, 1326, 1327, 1329, 1330, 1331, 1332, 1334, 1335, 1336, 1338, 1349, 1352, 1353, 1354, 1355, 1356, 1357, 1358, 1359, 1360, 1361, 1362, 1363, 1364, 1365, 1366, 1367, 1368, 1369, 1370, 1371, 1372, 1373, 1374, 1375, 1376, 1377, 1378, 1379, 1380, 1381, 1382, 1384, 1385, 1386, 1387, 1388, 1389, 1390, 1391, 1392, 1393, 1394, 1395, 1396, 1397, 1398, 1399, 1400, 1401, 1402, 1403, 1404, 1405, 1406, 1407, 1408, 1409, 1410, 1411, 1412, 1413, 1414, 1415, 1416, 1417, 1418, 1419, 1420, 1421, 1422, 1423, 1424, 1425, 1426, 1427, 1428, 1429, 1430, 1431, 1432, 1433, 1434, 1435, 1436, 1437, 1438, 1439, 1440, 1441, 1442, 1443, 1444, 1445, 1446, 1447, 1448, 1449, 1450, 1451, 1452, 1453, 1454, 1455, 1456, 1457, 1458, 1459, 1460, 1461, 1462, 1463, 1464, 1465, 1466, 1467, 1468, 1469, 1470, 1471, 1472, 1473, 1474, 1475, 1476, 1477, 1478, 1479, 1480, 1481, 1482, 1483, 1484, 1485, 1486, 1487, 1488, 1489, 1490, 1491, 1492, 1493, 1494, 1495, 1496, 1497, 1498, 1499, 1500, 1501, 1502, 1503, 1504, 1505, 1506, 1507, 1508, 1509, 1510, 1511, 1512, 1513, 1514, 1515, 1516, 1517, 1518, 1519, 1520, 1521, 1522, 1523, 1524, 1525, 1526, 1527, 1528, 1529, 1530, 1531, 1532, 1533, 1540, 1541, 1542, 1543, 1544, 1545, 1546, 1547, 1548, 1549, 1550, 1551, 1552, 1553, 1554, 1555, 1556, 1557, 1561, 1562, 1563, 1566, 1567, 1575, 1576, 1577, 1578, 1579, 1580, 1581, and 1582.

[0244] FIGS. 31 and 32 show a comparison of MHC agretopes in the constant domains of human IgG1 (SEQ ID NO:1) versus the engineered Fc variants of SEQ ID NO 420-1582. Columns are included for agretopes with IScore≧10 in at least one variant are shown. The agretopes corresponding to residues 369-377 and 404-412 are the same in all the variants and are therefore not shown below. FIG. 31 shows only those Fc variants that have a decrease in IScore of greater than 9.0 for one or more agretopes, while FIG. 32 shows only those Fc variants that have an increase in IScore of greater than 9.0 for one or more agretopes.

[0245] Of special interest are variants with substitutions that lower IScore of at least one agretope from 25 or higher to lower than 10, and that do not exhibit substantial increases in IScore for any nine-mer fragment. Variants that substantially decrease IScore for agretope 16 include, but are not limited to, SEQ_ID_NO: 727 (M252L/I253G) and 732 (I253G). Variants that substantially decrease IScore for agretope 18 include, but are not limited to, SEQ_ID_NO: 956 (D280K), 958 (D280W), 959 (D280P), 960 (D280G), 1077 (Y278D), 1185 (H285D), 1186 (H285E), 1245 (V282E), 1246 (V282K), 1247 (V282Y), 1249 (V282G), 1255 (E283G), 1572 (S267E/V282G), 1573 (G281D/V282G), and 1574 (V282G/P331D). Variants that substantially decrease IScore for agretope 19a include, but are not limited to, SEQ_ID_NO: 799 (Y300D), 800 (Y300E), 801 (Y300N), 802 (Y300Q), 803 (Y300K), 804 (Y300R), 805 (Y300S), 806 (Y300T), 807 (Y300H), 808 (Y300A), 812, (Y300P), 813 (Y300G), and 1282 (R301D). Variants that substantially decrease IScore for agretope 20a include, but are not limited to, SEQ_ID_NO: 1286 (V303D), 1287 (V303E), 1288 (V303Y), and 1289 (S304D). Variants that substantially decrease IScore for agretope 21a include, but are not limited to, SEQ_ID_NO: 1286 (V303D), 1287 (V303E), 1289 (S304D), and 1294 (V305E).

[0246] Examples of Fc variants with substantially increased IScore for at least one nine-mer agretope include but are not limited to SEQ ID NO 929-933, which has a significantly higher IScore for agretope 17a (residues 262-270) than the parent protein of SEQ ID NO 1 due to the D270S, D270L, D270I, D270F, and D270M substitutions; SEQ ID NO 1101-1105, which has a new agretope at residues 322-330 with IScore of 31 or 45 that is caused by the K332V, K332I, K332F, K332Y, and K332W substitutions; and SEQ ID NO 1149-1157, which have a new agretope at residues 234-242 with IScore of 15-39 that is caused by the G237S, G237T, G237H, G237H, G237V, G237L, G237I, G237F, G237M, and G237Y substitutions.

[0247] Compensatory mutations that are included in the library of Fc variants, reduce IScore for residues 234-242 in SEQ ID NO 1149-1157 to less than 10, and that do not introduce any new agretopes include but are not limited to L234A, L234D, L234E, L234G, L234H, L234K, L234N, L234P, L234S, and L234T; as well as L235D, S239D, and S239E for SEQ ID NO 1149 (G237S) and SEQ ID NO 1150 (G237T); G236D, G236E, L235D, L235E, L235P, L235S, L235T, S239D, S239E, S239H, and V240A for SEQ ID NO 1151 (G237H), SEQ ID NO 1153 (G237L) SEQ ID NO 1156 (G237M); G236D, G236E, L235D, L235P, L235S, S239D, S239E, S239H, and V240A for SEQ ID NO 1152 (G237V) and SEQ ID NO 1155 (G237F); G236D, L235D, L235P, and V240A for SEQ ID NO 1154 (G237I); and G236D, G236E, L235D, L235E, L235P, L235S, L235T, S239D, S239E, and S239H for SEQ ID NO 1157 (G237Y).

[0248] Compensatory mutations that are included in the library of Fc variants, reduce IScore for residues 262-270 in SEQ ID NO 929-933 to less than 10, and that do not introduce any new agretopes include but are not limited to V262E, V263A, V263T, V264D, S267D, S267E, S267F, and S267Y; as well as V263I, V263M, V264E, S267M, S267Q, S267W, and H268R for SEQ ID NO 930 (D270L); V263M, V264E, S267M, and S267W for SEQ ID NO 931 (D270I); V264E and S267W for SEQ ID NO 932 (D270F); and V264E and S267W for SEQ ID NO 933 (D270M).

[0249] Compensatory mutations that are included in the library of Fc variants, reduce IScore for residues 322-330 in SEQ ID NO 1101-1105 to less than 10, and that do not introduce any new agretopes include but are not limited to S324D, N325P, A327D, A327E; as well as A327W, L328D, L328E, L328G, L328K, L328S, A330Y, A330R, A330W, A330E, A330N, A330P, and A330G for SEQ ID NO 1101 (K332V); L328D and L328G for SEQ ID NO 1104 (K332Y); and L328D and L328G for SEQ ID NO 1105 (K332W).

[0250] The MHC agretopes in the most preferred Fc variants are quite similar to the MHC agretopes in the parent human IgG1 sequence of SEQ ID NO:1, as shown in FIG. 33.

### Example 5

### Reducing Variable Domain MHC Binding Without Increasing Non-Human Sequence Content

[0251] Due to the diversity of human germline variable domains, it is possible to construct additional sequences with fully human sequence content (defined in this example to mean that all nine residue fragments are present in at least one human germline sequence). All of the single amino acid changes that retain fully human sequence content were computationally generated and analyzed for predicted MHC binding. In FIGS. 34 and 35, IScore is shown for each of the nine-mers at which a single amino acid change that preserves fully human sequence content reduces IScore significantly relative to the parent human heavy chain variable domain sequence.

[0252] Single amino acid changes in a given variable domain may be combined freely so long as they are separated by nine or more residues. For example, in vlk_{—}1-6 the substitution S10T may be combined with either L46R or L46S to yield a sequence with fully human sequence content and that has low predicted MHC binding for all nine-mer fragments. Furthermore, the approach described here may be extended beyond single substitutions. That is, multiple substitutions (either within a nine-mer fragment or not) may be added while retaining fully human sequence content.

[0253] Additional substitutions including but not limited to those described herein may be incorporated into these variants in order to reduce the immunogenicity further. Residue numbering is based on that of IgG1.

[0254] While the foregoing invention has been described above, it will be clear to one skilled in the art that various changes and additional embodiments made be made without departing from the scope of the invention. All references cited herein, including patents, patent applications,(provisional, utility and PCT), and publications are incorporated by reference in their entirety.

The application's sequence listing, which the Patent Office published only in electronic form, follows.

SEQUENCE LISTING (1939 sequences)

SEQ ID NO: 1 - protein, 330 aa, Homo sapiens [sequence omitted]

SEQ ID NO: 2 - protein, 326 aa, Homo sapiens
ASTKGPSVFPLAPCSRSTSESTAALGCLVKDYFPEPVTVSWNSGALTSGVHTFPAVLQSSGLYSLSSVVTVPSSNFGTQTYTCNVDHKPSNTKVDKTVERKCCVECPPCPAPPVAGPSVFLFPPKPKDTLMISRTPEVTCVVVDVSHEDPEVQFNWYVDGVEVHNAKTKPREEQFNSTFRVVSVLTVVHQDWLNGKEYKCKVSNKGLPAPIEKTISKTKGQPREPQVYTLPPSREEMTKNQVSLTCLVKGFYPSDIAVEWESNGQPENNYKTTPPMLDSDGSFFLYSKLTVDKSRWQQGNVFSCSVMHEALHNHYTQKSLSLSPGK

SEQ ID NO: 3 - protein, 377 aa, Homo sapiens
ASTKGPSVFPLAPCSRSTSGGTAALGCLVKDYFPEPVTVSWNSGALTSGVHTFPAVLQSSGLYSLSSVVTVPSSSLGTQTYTCNVNHKPSNTKVDKRVELKTPLGDTTHTCPRCPEPKSCDTPPPCPRCPEPKSCDTPPPCPRCPEPKSCDTPPPCPRCPAPELLGGPSVFLFPPKPKDTLMISRTPEVTCVVVDVSHEDPEVQFKWYVDGVEVHNAKTKPREEQYNSTFRVVSVLTVLHQDWLNGKEYKCKVSNKALPAPIEKTISKTKGQPREPQVYTLPPSREEMTKNQVSLTCLVKGFYPSDIAVEWESSGQPENNYNTTPPMLDSDGSFFLYSKLTVDKSRWQQGNIFSCSVMHEALHNRFTQKSLSLSPGK

SEQ ID NO: 4 - protein, 330 aa, Homo sapiens
ASTKGPSVFPLAPCSRSTSESTAALGCLVKDYFPEPVTVSWNSGALTSGVHTFPAVLQSSGLYSLSSVVTVPSSSLGTKTYTCNVDHKPSNTKVDKRVESKYGDKTHTCPPCPAPEFLGGPSVFLFPPKPKDTLMISRTPEVTCVVVDVSQEDPEVQFNWYVDGVEVHNAKTKPREEQFNSTYRVVSVLTVLHQDWLNGKEYKCKVSNKGLPSSIEKTISKAKGQPREPQVYTLPPSQEEMTKNQVSLTCLVKGFYPSDIAVEWESNGQPENNYKTTPPVLDSDGSFFLYSRLTVDKSRWQEGNVFSCSVMHEALHNHYTQKSLSLSLGK

SEQ ID NO: 5 - protein, 98 aa, Homo sapiens
QVQLVQSGAEVKKPGASVKVSCKASGYTFTGYYMHWVRQAPGQGLEWMGRINPNSGGTNYAQKFQGRVTSTRDTSISTAYMELSRLRSDDTVVYYCAR

SEQ ID NO: 6 - protein, 98 aa, Homo sapiens
QVQLVQSGAEVKKPGASVKVSCKASGYTFTSYAMHWVRQAPGQRLEWMGWINAGNGNTKYSQKFQGRVTITRDTSASTAYMELSSLRSEDTAVYYCAR

SEQ ID NO: 7 - protein, 98 aa, Homo sapiens
QVQLVQSGAEVKKPGASVKVSCKASGYTFTSYDINWVRQATGQGLEWMGWMNPNSGNTGYAQKFQGRVTMTRNTSISTAYMELSSLRSEDTAVYYCAR

SEQ ID NO: 8 - protein, 98 aa, Homo sapiens
QVQLVQSGAEVKKPGASVKVSCKASGYTFTSYGISWVRQAPGQGLEWMGWISAYNGNTNYAQKLQGRVTMTTDTSTSTAYMELRSLRSDDTAVYYCAR

SEQ ID NO: 9 - protein, 98 aa, Homo sapiens
QVQLVQSGAEVKKPGASVKVSCKVSGYTLTELSMHWVRQAPGKGLEWMGGFDPEDGETIYAQKFQGRVTMTEDTSTDTAYMELSSLRSEDTAVYYCAT

SEQ ID NO: 10 - protein, 98 aa, Homo sapiens
QMQLVQSGAEVKKTGSSVKVSCKASGYTFTYRYLHWVRQAPGQALEWMGWITPFNGNTNYAQKFQDRVTITRDRSMSTAYMELSSLRSEDTAMYYCAR

SEQ ID NO: 11 - protein, 98 aa, Homo sapiens
QVQLVQSGAEVKKPGASVKVSCKASGYTFTSYYMHWVRQAPGQGLEWMGIINPSGGSTSYAQKFQGRVTMTRDTSTSTVYMELSSLRSEDTAVYYCAR

SEQ ID NO: 12 - protein, 98 aa, Homo sapiens
QMQLVQSGPEVKKPGTSVKVSCKASGFTFTSSAVQWVRQARGQRLEWIGWIVVGSGNTNYAQKFQERVTITRDMSTSTAYMELSSLRSEDTAVYYCAA

SEQ ID NO: 13 - protein, 98 aa, Homo sapiens
QVQLVQSGAEVKKPGSSVKVSCKASGGTFSSYAISWVRQAPGQGLEWMGGIIPIFGTANYAQKFQGRVTITADESTSTAYMELSSLRSEDTAVYYCAR

SEQ ID NO: 14 - protein, 98 aa, Homo sapiens
EVQLVQSGAEVKKPGATVKISCKVSGYTFTDYYMHWVQQAPGKGLEWMGLVDPEDGETIYAEKFQGRVTITADTSTDTAYMELSSLRSEDTAVYYCAT

SEQ ID NO: 15 - protein, 100 aa, Homo sapiens
QITLKESGPTLVKPTQTLTLTCTFSGFSLSTSGVGVGWIRQPPGKALEWLALIYWNDDKRYSPSLKSRLTITKDTSKNQVVLTMTNMDPVDTATYYCAHR

SEQ ID NO: 16 - protein, 100 aa, Homo sapiens
QVTLKESGPVLVKPTETLTLTCTVSGFSLSNARMGVSWIRQPPGKALEWLAHIFSNDEKSYSTSLKSRLTISKDTSKSQVVLTMTNMDPVDTATYYCARI

SEQ ID NO: 17 - protein, 100 aa, Homo sapiens
QVTLRESGPALVKPTQTLTLTCTFSGFSLSTSGMCVSWIRQPPGKALEWLALIDWDDDKYYSTSLKTRLTISKDTSKNQVVLTMTNMDPVDTATYYCARI

SEQ ID NO: 18 - protein, 98 aa, Homo sapiens
EVQLVESGGGLVQPGGSLRLSCAASGFTFSSYWMSWVRQAPGKGLEWVANIKQDGSEKYYVDSVKGRFTISRDNAKNSLYLQMNSLRAEDTAVYYCAR

SEQ ID NO: 19 - protein, 99 aa, Homo sapiens
EVQLVESGGGLVQPGRSLRLSCAASGFTFDDYAMHWVRQAPGKGLEWVSGISWNSGSIGYADSVKGRFTISRDNAKNSLYLQMNSLRAEDTALYYCAKD

SEQ ID NO: 20 - protein, 98 aa, Homo sapiens
QVQLVESGGGLVKPGGSLRLSCAASGFTFSDYYMSWIRQAPGKGLEWVSYISSSGSTIYYADSVKGRFTISRDNAKNSLYLQMNSLRAEDTAVYYCAR

SEQ ID NO: 21 - protein, 97 aa, Homo sapiens
EVQLVESGGGLVQPGGSLRLSCAASGFTFSSYDMHWVRQATGKGLEWVSAIGTAGDTYYPGSVKGRFTISRENAKNSLYLQMNSLRAGDTAVYYCAR

SEQ ID NO: 22 - protein, 100 aa, Homo sapiens
EVQLVESGGGLVKPGGSLRLSCAASGFTFSNAWMSWVRQAPGKGLEWVGRIKSKTDGGTTDYAAPVKGRFTISRDDSKNTLYLQMNSLKTEDTAVYYCTT

SEQ ID NO: 23 - protein, 98 aa, Homo sapiens
EVQLVESGGGLVQPGGSLRLSCAASGFTFSNSDMNWARKAPGKGLEWVSGVSWNGSRTHYVDSVKRRFIISRDNSRNSLYLQKNRRRAEDMAVYYCVR

SEQ ID NO: 24 - protein, 98 aa, Homo sapiens
TVQLVESGGGLVEPGGSLRLSCAASGFTFSNSDMNWVRQAPGKGLEWVSGVSWNGSRTHYADSVKGRFIISRDNSRNFLYQQMNSLRPEDMAVYYCVR

SEQ ID NO: 25 - protein, 98 aa, Homo sapiens
EVQLVESGGGVVRPGGSLRLSCAASGFTFDDYGMSWVRQAPGKGLEWVSGINWNGGSTGYADSVKGRFTISRDNAKNSLYLQMNSLRAEDTALYHCAR

SEQ ID NO: 26 - protein, 98 aa, Homo sapiens
EVQLVESGGGLVKPGGSLRLSCAASGFTFSSYSMNWVRQAPGKGLEWVSSISSSSSYIYYADSVKGRFTISRDNAKNSLYLQMNSLRAEDTAVYYCAR

SEQ ID NO: 27 - protein, 98 aa, Homo sapiens
EVQLLESGGGLVQPGGSLRLSCAASGFTFSSYAMSWVRQAPGKGLEWVSAISGSGGSTYYADSVKGRFTISRDNSKNTLYLQMNSLRAEDTAVYYCAK

SEQ ID NO: 28 - protein, 98 aa, Homo sapiens
QVQLVESGGGVVQPGRSLRLSCAASGFTFSSYAMHWVRQAPGKGLEWVAVISYDGSNKYYADSVKGRFTISRDNSKNTLYLQMNSLRAEDTAVYYCAR

SEQ ID NO: 29 - protein, 98 aa, Homo sapiens; identical to SEQ ID NO: 28

SEQ ID NO: 30 - protein, 98 aa, Homo sapiens
QVQLVESGGGVVQPGRSLRLSCAASGFTFSSYGMHWVRQAPGKGLEWVAVIWYDGSNKYYADSVKGRFTISRDNSKNTLYLQMNSLRAEDTAVYYCAR

SEQ ID NO: 31 - protein, 98 aa, Homo sapiens
EVQLVESGGGLVQPGGSLRLSCAASGFTFSNSDMNWVHQAPGKGLEWVSGVSWNGSRTHYADSVKGRFIISRDNSRNTLYLQTNSLRAEDTAVYYCVR

SEQ ID NO: 32 - protein, 97 aa, Homo sapiens
EVQLVESGGGLVQPRGSLRLSCAASGFTVSSNEMSWIRQAPGKGLEWVSSISGGSTYYADSRKGRFTISRDNSKNTLYLQMNNLRAEGTAAYYCARY

SEQ ID NO: 33 - protein, 99 aa, Homo sapiens
EVQLVESGGVVVQPGGSLRLSCAASGFTFDDYTMHWVRQAPGKGLEWVSLISWDGGSTYYADSVKGRFTISRDNSKNSLYLQMNSLRTEDTALYYCAKD

SEQ ID NO: 34 - protein, 97 aa, Homo sapiens
EDQLVESGGGLVQPGGSLRPSCAASGFAFSSYALHWVRRAPGKGLEWVSAIGTGGDTYYADSVMGRFTISRDNAKKSLYLHMNSLIAEDMAVYYCAR

SEQ ID NO: 35 - protein, 98 aa, Homo sapiens
EVQLVESGGGLVQPGGSLRLSCAASGFTFSSYSMNWVRQAPGKGLEWVSYISSSSSTIYYADSVKGRFTISRDNAKNSLYLQMNSLRAEDTAVYYCAR

SEQ ID NO: 36 - protein, 100 aa, Homo sapiens
EVQLVESGGGLVQPGRSLRLSCTASGFTFGDYAMSWFRQAPGKGLEWVGFIRSKAYGGTTEYTASVKGRFTISRDGSKSIAYLQMNSLKTEDTAVYYCTR

SEQ ID NO: 37 - protein, 97 aa, Homo sapiens
EVQLVESGGGLIQPGGSLRLSCAASGFTVSSNYMSWVRQAPGKGLEWVSVIYSGGSTYYADSVKGRFTISRDNSKNTLYLQMNSLRAEDTAVYYCAR

SEQ ID NO: 38 - protein, 98 aa, Homo sapiens
EVQLVESGGGLVQPGGSLRLSCAASGFTFSSYAMHWVRQAPGKGLEYVSAISSNGGSTYYANSVKGRFTISRDNSKNTLYLQMGSLRAEDMAVYYCAR

SEQ ID NO: 39 - protein, 97 aa, Homo sapiens
EVQLVESGGGLVQPGGSLRLSCAASGFTVSSNYMSWVRQAPGKGLEWVSVIYSGGSTYYADSVKGRFTISRDNSKNTLYLQMNSLRAEDTAVYYCAR

SEQ ID NO: 40 - protein, 100 aa, Homo sapiens
EVQLVESGGGLVQPGGSLRLSCAASGFTFSDHYMDWVRQAPGKGLEWVGRTRNKANSYTTEYAASVKGRFTISRDDSKNSLYLQMNSLKTEDTAVYYCAR

SEQ ID NO: 41 - protein, 100 aa, Homo sapiens
EVQLVESGGGLVQPGGSLKLSCAASGFTFSGSAMHWVRQASGKGLEWVGRIRSKANSYATAYAASVKGRFTISRDDSKNTAYLQMNSLKTEDTAVYYCTR

SEQ ID NO: 42 - protein, 98 aa, Homo sapiens
EVQLVESGGGLVQPGGSLRLSCAASGFTFSSYWMHWVRQAPGKGLVWVSRINSDGSSTSYADSVKGRFTISRDNAKNTLYLQMNSLRAEDTAVYYCAR

SEQ ID NO: 43 - protein, 96 aa, Homo sapiens
EVQLVESRGVLVQPGGSLRLSCAASGFTVSSNEMSWVRQAPGKGLEWVSSISGGSTYYADSRKGRFTISRDNSKNTLHLQMNSLRAEDTAVYYCKK

SEQ ID NO: 44 - protein, 98 aa, Homo sapiens
QVQLQESGPGLVKPPGTLSLTCAVSGGSISSSNWWSWVRQPPGKGLEWIGEIYHSGSTNYNPSLKSRVTISVDKSKNQFSLKLSSVTAADTAVYCCAR

SEQ ID NO: 45 - protein, 98 aa, Homo sapiens
QVQLQESGPGLVKPSDTLSLTCAVSGYSISSSNWWGWIRQPPGKGLEWIGYIYYSGSTYYNPSLKSRVTMSVDTSKNQFSLKLSSVTAVDTAVYYCAR

SEQ ID NO: 46 - protein, 99 aa, Homo sapiens
QLQLQESGSGLVKPSQTLSLTCAVSGGSISSGGYSWSWIRQPPGKGLEWIGYIYHSGSTYYNPSLKSRVTISVDRSKNQFSLKLSSVTAADTAVYYCAR

SEQ ID NO: 47 - protein, 99 aa, Homo sapiens
QVQLQESGPGLVKPSQTLSLTCTVSGGSISSGDYYWSWIRQPPGKGLEWIGYIYYSGSTYYNPSLKSRVTISVDTSKNQFSLKLSSVTAADTAVYYCAR

SEQ ID NO: 48 - protein, 99 aa, Homo sapiens
QVQLQESGPGLVKPSQTLSLTCTVSGGSISSGGYYWSWIRQHPGKGLEWIGYIYYSGSTYYNPSLKSLVTISVDTSKNQFSLKLSSVTAADTAVYYCAR

SEQ ID NO: 49 - protein, 97 aa, Homo sapiens
QVQLQQWGAGLLKPSETLSLTCAVYGGSFSGYYWSWIRQPPGKGLEWIGEINHSGSTNYNPSLKSRVTISVDTSKNQFSLKLSSVTAADTAVYYCAR

SEQ ID NO: 50 - protein, 99 aa, Homo sapiens
QLQLQESGPGLVKPSETLSLTCTVSGGSISSSSYYWGWIRQPPGKGLEWIGSIYYSGSTYYNPSLKSRVTISVDTSKNQFSLKLSSVTAADTAVYYCAR

SEQ ID NO: 51 - protein, 97 aa, Homo sapiens
QVQLQESGPGLVKPSETLSLTCTVSGGSISSYYWSWIRQPPGKGLEWIGYIYYSGSTNYNPSLKSRVTISVDTSKNQFSLKLSSVTAADTAVYYCAR

SEQ ID NO: 52 - protein, 99 aa, Homo sapiens
QVQLQESGPGLVKPSETLSLTCTVSGGSVSSGSYYWSWIRQPPGKGLEWIGYIYYSGSTNYNPSLKSRVTISVDTSKNQFSLKLSSVTAADTAVYYCAR

SEQ ID NO: 53 - protein, 98 aa, Homo sapiens
QVQLQESGPGLVKPSETLSLTCAVSGYSISSGYYWGWIRQPPGKGLEWIGSIYHSGSTYYNPSLKSRVTISVDTSKNQFSLKLSSVTAADTAVYYCAR

SEQ ID NO: 54 - protein, 98 aa, Homo sapiens
EVQLVQSGAEVKKPGESLKISCKGSGYSFTSYWIGWVRQMPGKGLEWMGIIYPGDSDTRYSPSFQGQVTISADKSISTAYLQWSSLKASDTAMYYCAR

SEQ ID NO: 55 - protein, 98 aa, Homo sapiens
EVQLVQSGAEVKKPGESLRISCKGSGYSFTSYWISWVRQMPGKGLEWMGRIDPSDSYTNYSPSFQGHVTISADKSISTAYLQWSSLKASDTAMYYCAR

SEQ ID NO: 56 - protein, 101 aa, Homo sapiens
QVQLQQSGPGLVKPSQTLSLTCAISGDSVSSNSAAWNWIRQSPSRGLEWLGRTYYRSKWYNDYAVSVKSRITINPDTSKNQFSLQLNSVTPEDTAVYYCAR

SEQ ID NO: 57 - protein, 98 aa, Homo sapiens
QVQLVQSGSELKKPGASVKVSCKASGYTFTSYAMNWVRQAPGQGLEWMGWINTNTGNPTYAQGFTGRFVFSLDTSVSTAYLQICSLKAEDTAVYYCAR

SEQ ID NO: 58 - protein, 98 aa, Homo sapiens
QVQLVQSGHEVKQPGASVKVSCKASGYSFTTYGMNWVPQAPGQGLEWMGWFNTYTGNPTYAQGFTGRFVFSMDTSASTAYLQISSLKAEDMAMYYCAR

SEQ ID NO: 59 - protein, 95 aa, Homo sapiens
DIQMTQSPSTLSASVGDRVTITCRASQSISSWLAWYQQKPGKAPKLLIYDASSLESGVPSRFSGSGSGTEFTLTISSLQPDDFATYYCQQYNSYS

SEQ ID NO: 60 - protein, 95 aa, Homo sapiens
AIQMTQSPSSLSASVGDRVTITCRASQGIRNDLGWYQQKPGKAPKLLIYAASSLQSGVPSRFSGSGSGTDFTLTISSLQPEDFATYYCLQDYNYP

SEQ ID NO: 61 - protein, 95 aa, Homo sapiens
AIRMTQSPSSFSASTGDRVTITCRASQGISSYLAWYQQKPGKAPKLLIYAASTLQSGVPSRFSGSGSGTDFTLTISCLQSEDFATYYCQQYYSYP

SEQ ID NO: 62 - protein, 95 aa, Homo sapiens
VIWMTQSPSLLSASTGDRVTISCRMSQGISSYLAWYQQKPGKAPELLIYAASTLQSGVPSRFSGSGSGTDFTLTISCLQSEDFATYYCQQYYSFP

SEQ ID NO: 63 - protein, 95 aa, Homo sapiens
DIQLTQSPSFLSASVGDRVTITCRASQGISSYLAWYQQKPGKAPKLLIYAASTLQSGVPSRFSGSGSGTEFTLTISSLQPEDFATYYCQQLNSYP

SEQ ID NO: 64 - protein, 95 aa, Homo sapiens
DIQMTQSPSSVSASVGDRVTITCRASQGISSWLAWYQQKPGKAPKLLIYAASSLQSGVPSRFSGSGSGTDFTLTISSLQPEDFATYYCQQANSFP

SEQ ID NO: 65 - protein, 95 aa, Homo sapiens; identical to SEQ ID NO: 64

SEQ ID NO: 66 - protein, 95 aa, Homo sapiens
AIQLTQSPSSLSASVGDRVTITCRASQGISSALAWYQQKPGKAPKLLIYDASSLESGVPSRFSGSGSGTDFTLTISSLQPEDFATYYCQQFNSYP

SEQ ID NO: 67 - protein, 95 aa, Homo sapiens
AIQLTQSPSSLSASVGDRVTITCRASQGISSALAWYQQKPGKAPKLLIYDASSLESGVPSRFSGSGSGTDFTLTISSLQPEDFATYYCQQFNNYP

SEQ ID NO: 68 - protein, 95 aa, Homo sapiens
DIQMTQSPSSLSASVGDRVTITCRASQGISNYLAWFQQKPGKAPKSLIYAASSLQSGVPSRFSGSGSGTDFTLTISSLQPEDFATYYCQQYNSYP

SEQ ID NO: 69 - protein, 95 aa, Homo sapiens
DIQMTQSPSSLSASVGDRVTITCRASQGISSWLAWYQQKPEKAPKSLIYAASSLQSGVPSRFSGSGSGTDFTLTISSLQPEDFATYYCQQYNSYP

SEQ ID NO: 70 - protein, 95 aa, Homo sapiens
DIQMTQSPSSLSASVGDRVTITCRASQGIRNDLGWYQQKPGKAPKRLIYAASSLQSGVPSRFSGSGSGTEFTLTISSLQPEDFATYYCLQHNSYP

SEQ ID NO: 71 - protein, 95 aa, Homo sapiens
NIQMTQSPSAMSASVGDRVTITCRARQGISNYLAWFQQKPGKVPKHLIYAASSLQSGVPSRFSGSGSGTEFTLTISSLQPEDFATYYCLQHNSYP

SEQ ID NO: 72 - protein, 95 aa, Homo sapiens
DIQMTQSPSSLSASVGDRVTITCRASQGISNYLAWYQQKPGKVPKLLIYAASTLQSGVPSRFSGSGSGTDFTLTISSLQPEDVATYYCQKYNSAP

SEQ ID NO: 73 - protein, 95 aa, Homo sapiens
DIQMTQSPSSLSASVGDRVTITCQASQDISNYLNWYQQKPGKAPKLLIYDASNLETGVPSRFSGSGSGTDFTFTISSLQPEDIATYYCQQYDNLP

SEQ ID NO: 74 - protein, 95 aa, Homo sapiens; identical to SEQ ID NO: 73

SEQ ID NO: 75 - protein, 95 aa, Homo sapiens
DIQLTQSPSSLSASVGDRVTITCRVSQGISSYLNWYRQKPGKVPKLLIYSASNLQSGVPSRFSGSGSGTDFTLTISSLQPEDVATYYGQRTYNAP

SEQ ID NO: 76 - protein, 95 aa, Homo sapiens; identical to SEQ ID NO: 75

SEQ ID NO: 77 - protein, 95 aa, Homo sapiens
DIQMTQSPSSLSASVGDRVTITCRASQSISSYLNWYQQKPGKAPKLLIYAASSLQSGVPSRFSGSGSGTDFTLTISSLQPEDFATYYCQQSYSTP

SEQ ID NO: 78 - protein, 95 aa, Homo sapiens; identical to SEQ ID NO: 77

SEQ ID NO: 79 - protein, 95 aa, Homo sapiens
DIQMIQSPSFLSASVGDRVSIICWASEGISSNLAWYLQKPGKSPKLFLYDAKDLHPGVSSRFSGRGSGTDFTLTIISLKPEDFAAYYCKQDFSYP

SEQ ID NO: 80 - protein, 95 aa, Homo sapiens
AIRMTQSPFSLSASVGDRVTITCWASQGISSYLAWYQQKPAKAPKLFIYYASSLQSGVPSRFSGSGSGTDYTLTISSLQPEDFATYYCQQYYSTP

SEQ ID NO: 81 - protein, 100 aa, Homo sapiens
DIVMTQTPLSSPVTLGQPASISCRSSQSLVHSDGNTYLSWLQQRPGQPPRLLIYKISNRFSGVPDRFSGSGAGTDFTLKISRVEAEDVGVYYCMQATQFP

SEQ ID NO: 82 - protein, 100 aa, Homo sapiens
DIVMTQTPLSSPVTLGQPASISFRSSQSLVHSDGNTYLSWLQQRPGQPPRLLIYKVSNRFSGVPDRFSGSGAGTDFTLKISRVEAEDVGVYYCTQATQFP

SEQ ID NO: 83 - protein, 100 aa, Homo sapiens
DIVMTQSPLSLPVTPGEPASISCRSSQSLLHSNGYNYLDWYLQKPGQSPQLLIYLGSNRASGVPDRFSGSGSGTDFTLKISRVEAEDVGVYYCMQALQTP

SEQ ID NO: 84 - protein, 100 aa, Homo sapiens; identical to SEQ ID NO: 83

SEQ ID NO: 85 - protein, 100 aa, Homo sapiens
DIVMTQTPLSLSVTPGQPASISCKSSQSLLHSDGKTYLYWYLQKPGQSPQLLIYEVSSRFSGVPDRFSGSGSGTDFTLKISRVEAEDVGVYYCMQGIHLP

SEQ ID NO: 86 - protein, 100 aa, Homo sapiens
DIVMTQTPLSLSVTPGQPASISCKSSQSLLHSDGKTYLYWYLQKPGQPPQLLIYEVSNRFSGVPDRFSGSGSGTDFTLKISRVEAEDVGVYYCMQSIQLP

SEQ ID NO: 87 - protein, 100 aa, Homo sapiens
DVVMTQSPLSLPVTLGQPASISCRSSQSLVYSDGNTYLNWFQQRPGQSPRRLIYKVSNRDSGVPDRFSGSGSGTDFTLKISRVEAEDVGVYYCMQGTHWP

SEQ ID NO: 88 - protein, 100 aa, Homo sapiens
DVVMTQSPLSLPVTLGQPASISCRSSQSLVYSDGNTYLNWFQQRPGQSPRRLIYKVSNWDSGVPDRFSGSGSGTDFTLKISRVEAEDVGVYYCMQGTHWP

SEQ ID NO: 89 - protein, 101 aa, Homo sapiens
DIVMTQTPLSLPVTPGEPASISCRSSQSLLDSDDGNTYLDWYLQKPGQSPQLLIYTLSYRASGVPDRFSGSGSGTDFTLKISRVEAEDVGVYYCMQRIEFP

SEQ ID NO: 90 - protein, 101 aa, Homo sapiens; identical to SEQ ID NO: 89

SEQ ID NO: 91 - protein, 96 aa, Homo sapiens
EIVMTQSPPTLSLSPGERVTLSCRASQSVSSSYLTWYQQKPGQAPRLLIYGASTRATSIPARFSGSGSGTDFTLTISSLQPEDFAVYYCQQDHNLP

SEQ ID NO: 92 - protein, 96 aa, Homo sapiens
EIVMTQSPATLSLSPGERATLSCRASQSVSSSYLSWYQQKPGQAPRLLIYGASTRATGIPARFSGSGSGTDFTLTISSLQPEDFAVYYCQQDYNLP

SEQ ID NO: 93 - protein, 95 aa, Homo sapiens
EIVLTQSPATLSLSPGERATLSCRASQSVSSYLAWYQQKPGQAPRLLIYDASNRATGIPARFSGSGSGTDFTLTISSLEPEDFAVYYCQQRSNWP

SEQ ID NO: 94 - protein, 95 aa, Homo sapiens
EIVLTQSPATLSLSPGERATLSCRASQGVSSYLAWYQQKPGQAPRLLIYDASNRATGIPARFSGSGPGTDFTLTISSLEPEDFAVYYCQQRSNWH

SEQ ID NO: 95 - protein, 95 aa, Homo sapiens
EIVMTQSPATLSVSPGERATLSCRASQSVSSNLAWYQQKPGQAPRLLIYGASTRATGIPARFSGSGSGTEFTLTISSLQSEDFAVYYCQQYNNWP

SEQ ID NO: 96 - protein, 95 aa, Homo sapiens; identical to SEQ ID NO: 95

SEQ ID NO: 97 - protein, 96 aa, Homo sapiens
EIVLTQSPGTLSLSPGERATLSCRASQSVSSSYLAWYQQKPGQAPRLLIYGASSRATGIPDRFSGSGSGTDFTLTISRLEPEDFAVYYCQQYGSSP

SEQ ID NO: 98 - protein, 96 aa, Homo sapiens
EIVLTQSPATLSLSPGERATLSCGASQSVSSSYLAWYQQKPGLAPRLLIYDASSRATGIPDRFSGSGSGTDFTLTISRLEPEDFAVYYCQQYGSSP

SEQ ID NO: 99 - protein, 101 aa, Homo sapiens
DIVMTQSPDSLAVSLGERATINCKSSQSVLYSSNNKNYLAWYQQKPGQPPKLLIYWASTRESGVPDRFSGSGSGTDFTLTISSLQAEDVAVYYCQQYYSTP

SEQ ID NO: 100 - protein, 95 aa, Homo sapiens
ETTLTQSPAFMSATPGDKVNISCKASQDIDDDMNWYQQKPGEAAIFIIQEATTLVPGIPPRFSGSGYGTDFTLTINNIESEDAAYYFCLQHDNFP

SEQ ID NO: 101 - protein, 95 aa, Homo sapiens
EIVLTQSPDFQSVTPKEKVTITCRASQSIGSSLHWYQQKPDQSPKLLIKYASQSFSGVPSRFSGSGSGTDFTLTINSLEAEDAATYYCHQSSSLP

SEQ ID NO: 102 - protein, 95 aa, Homo sapiens; identical to SEQ ID NO: 101

SEQ ID NO: 103 - protein, 95 aa, Homo sapiens
DVVMTQSPAFLSVTPGEKVTITCQASEGIGNYLYWYQQKPDQAPKLLIKYASQSISGVPSRFSGSGSGTDFTFTISSLEAEDAATYYCQQGNKHP

SEQ ID NO: 104 - protein, 99 aa, Homo sapiens
DIVLTQSPASLAVSPGQRATITCRASESVSFLGINLIHWYQQKPGQPPKLLIYQASNKDTGVPARFSGSGSGTDFTLTINPVEANDTANYYCLQSKNFP

SEQ ID NO: 105 - protein, 98 aa, Homo sapiens
QSVLTQPPSVSEAPRQRVTISCSGSSSNIGNNAVNWYQQLPGKAPKLLIYYDDLLPSGVSDRFSGSKSGTSASLAISGLQSEDEADYYCAAWDDSLNG

SEQ ID NO: 106 - protein, 99 aa, Homo sapiens
QSVLTQPPSVSGAPGQRVTISCTGSSSNIGAGYDVHWYQQLPGTAPKLLIYGNSNRPSGVPDRFSGSKSGTSASLAITGLQAEDEADYYCQSYDSSLSG

SEQ ID NO: 107 - protein, 98 aa, Homo sapiens
QSVLTQPPSVSAAPGQKVTISCSGSSSDMGNYAVSWYQQLPGTAPKLLIYENNKRPSGIPDRFSGSKSGTSATLGITGLWPEDEADYYCLAWDTSPRA

SEQ ID NO: 108 - protein, 98 aa, Homo sapiens
QSVLTQPPSASGTPGQRVTISCSGSSSNIGSNTVNWYQQLPGTAPKLLIYSNNQRPSGVPDRFSGSKSGTSASLAISGLQSEDEADYYCAAWDDSLNG

SEQ ID NO: 109 - protein, 98 aa, Homo sapiens
QSVLTQPPSASGTPGQRVTISCSGSSSNIGSNYVYWYQQLPGTAPKLLIYRNNQRPSGVPDRFSGSKSGTSASLAISGLRSEDEADYYCAAWDDSLSG

SEQ ID NO: 110 - protein, 99 aa, Homo sapiens
QSVLTQPPSVSGAPGQRVTISCTGSSSNIGAGYVVHWYQQLPGTAPKLLIYGNSNRPSGVPDQFSGSKSGTSASLAITGLQSEDEADYYCKAWDNSLNA

SEQ ID NO: 111 - protein, 98 aa, Homo sapiens
QSVLTQPPSVSAAPGQKVTISCSGSSSNIGNNYVSWYQQLPGTAPKLLIYDNNKRPSGIPDRFSGSKSGTSATLGITGLQTGDEADYYCGTWDSSLSA

SEQ ID NO: 112 - protein, 99 aa, Homo sapiens
QSALTQPPSASGSPGQSVTISCTGTSSDVGGYNYVSWYQQHPGKAPKLMIYEVSKRPSGVPDRFSGSKSGNTASLTVSGLQAEDEADYYCSSYAGSNNF

SEQ ID NO: 113 - protein, 99 aa, Homo sapiens
QSALTQPRSVSGSPGQSVTISCTGTSSDVGGYNYVSWYQQHPGKAPKLMIYDVSKRPSGVPDRFSGSKSGNTASLTISGLQAEDEADYYCCSYAGSYTF

SEQ ID NO: 114 - protein, 99 aa, Homo sapiens
QSALTQPASVSGSPGQSITISCTGTSSDVGGYNYVSWYQQHPGKAPKLMIYEVSNRPSGVSNRFSGSKSGNTASLTISGLQAEDEADYYCSSYTSSSTL

SEQ ID NO: 115 - protein, 99 aa, Homo sapiens
QSALTQPPSVSGSPGQSVTISCTGTSSDVGSYNRVSWYQQPPGTAPKLMIYEVSNRPSGVPDRFSGSKSGNTASLTISGLQAEDEADYYCSLYTSSSTF

SEQ ID NO: 116 - protein, 99 aa, Homo sapiens
QSALTQPASVSGSPGQSITISCTGTSSDVGSYNLVSWYQQHPGKAPKLMIYEGSKRPSGVSNRFSGSKSGNTASLTISGLQAEDEADYYCCSYAGSSTL

SEQ ID NO: 117 - protein, 99 aa, Homo sapiens
QSALTQPPFVSGAPGQSVTISCTGTSSDVGDYDHVFWYQKRLSTTSRLLIYNVNTRPSGISDLFSGSKSGNMASLTISGLKSEVEANYHCSLYSSSYTF

SEQ ID NO: 118 - protein, 95 aa, Homo sapiens
SYELTQPPSVSVSPGQTASITCSGDKLGDKYACWYQQKPGQSPVLVIYQDSKRPSGIPERFSGSNSGNTATLTISGTQAMDEADYYCQAWDSSTA

SEQ ID NO: 119 - protein, 95 aa, Homo sapiens
SYELTQPLSVSVALGQTARITCGGNNIGSKNVHWYQQKPGQAPVLVIYRDSNRPSGIPERFSGSNSGNTATLTISRAQAGDEADYYCQVWDSSTA

SEQ ID NO: 120 - protein, 96 aa, Homo sapiens
SYELTQPPSVSVSPGQTARITCSGDALPKKYAYWYQQKSGQAPVLVIYEDSKRPSGIPERFSGSSSGTMATLTISGAQVEDEADYYCYSTDSSGNH

SEQ ID NO: 121 - protein, 96 aa, Homo sapiens
SYELTQPHSVSVATAQMARITCGGNNIGSKAVHWYQQKPGQDPVLVIYSDSNRPSGIPERFSGSNPGNTTTLTISRIEAGDEADYYCQVWDSSSDH

SEQ ID NO: 122 - protein, 96 aa, Homo sapiens
SYELTQPPSVSVSLGQMARITCSGEALPKKYAYWYQQKPGQFPVLVIYKDSERPSGIPERFSGSSSGTIVTLTISGVQAEDEADYYCLSADSSGTY

SEQ ID NO: 123 - protein, 96 aa, Homo sapiens
SSELTQDPAVSVALGQTVRITCQGDSLRSYYASWYQQKPGQAPVLVIYGKNNRPSGIPDRFSGSSSGNTASLTITGAQAEDEADYYCNSRDSSGNH

SEQ ID NO: 124 - protein, 96 aa, Homo sapiens
SYVLTQPPSVSVAPGKTARITCGGNNIGSKSVHWYQQKPGQAPVLVIYYDSDRPSGIPERFSGSNSGNTATLTISRVEAGDEADYYCQVWDSSSDH

SEQ ID NO: 125 - protein, 94 aa, Homo sapiens
SYELTQLPSVSVSPGQTARITCSGDVLGENYADWYQQKPGQAPELVIYEDSERYPGIPERFSGSTSGNTTTLTISRVLTEDEADYYCLSGDEDN

SEQ ID NO: 126 - protein, 96 aa, Homo sapiens
SYELMQPPSVSVSPGQTARITCSGDALPKQYAYWYQQKPGQAPVLVIYKDSERPSGIPERFSGSSSGTTVTLTISGVQAEDEADYYCQSADSSGTY

SEQ ID NO: 127 - protein, 94 aa, Homo sapiens
SYELTQPSSVSVSPGQTARITCSGDVLAKKYARWFQQKPGQAPVLVIYKDSERPSGIPERFSGSSSGTTVTLTISGAQVEDEADYYCYSAADNN

SEQ ID NO: 128 - protein, 94 aa, Homo sapiens
SSGPTQVPAVSVALGQMARITCQGDSMEGSYEHWYQQKPGQAPVLVIYDSSDRPSRIPERFSGSKSGNTTTLTITGAQAEDEADYYYQLIDNHA

SEQ ID NO: 129 - protein, 103 aa, Homo sapiens
LPVLTQPPSASALLGASIKLTCTLSSEHSTYTIEWYQQRPGRSPQYIMKVKSDGSHSKGDGIPDRFMGSSSGADRYLTFSNLQSDDEAEYHCGESHTIDGQVG

SEQ ID NO: 130 - protein, 99 aa, Homo sapiens
QPVLTQSSSASASLGSSVKLTCTLSSGHSSYIIAWHQQQPGKAPRYLMKLEGSGSYNKGSGVPDRFSGSSSGADRYLTISNLQLEDEADYYCETWDSNT

SEQ ID NO: 131 - protein, 99 aa, Homo sapiens
QLVLTQSPSASASLGASVKLTCTLSSGHSSYAIAWHQQQPEKGPRYLMKLNSDGSHSKGDGIPDRFSGSSSGAERYLTISSLQSEDEADYYCQTWGTGI

SEQ ID NO: 132 - protein, 104 aa, Homo sapiens
QPVLTQPPSSSASPGESARLTCTLPSDINVGSYNIYWYQQKPGSPPRYLLYYYSDSDKGQGSGVPSRFSGSKDASANTGILLISGLQSEDEADYYCMIWPSNAS

SEQ ID NO: 133 - protein, 104 aa, Homo sapiens
QPVLTQPTSLSASPGASARFTCTLRSGINVGTYRIYWYQQKPGSLPRYLLRYKSDSDKQQGSGVPSRFSGSKDASTNAGLLLISGLQSEDEADYYCAIWYSSTS

SEQ ID NO: 134 - protein, 104 aa, Homo sapiens
QAVLTQPASLSASPGASASLTCTLRSGINVGTYRIYWYQQKPGSPPQYLLRYKSDSDKQQGSGVPSRFSGSKDASANAGILLISGLQSEDEADYYCMIWHSSAS

SEQ ID NO: 135 - protein, 104 aa, Homo sapiens
QPVLTQPTSLSASPGASARLTCTLRSGINLGSYRIFWYQQKPESPPRYLLSYYSDSSKHQGSGVPSRFSGSKDASSNAGILVISGLQSEDEADYYCMIWHSSAS

SEQ ID NO: 136 - protein, 105 aa, Homo sapiens
QPVLTQPSSHSASSGASVRLTCMLSSGFSVGDFWIRWYQQKPGNPPRYLLYYHSDSNKGQGSGVPSRFSGSNDASANAGILRISGLQPEDEADYYCGTWHSNSKT

SEQ ID NO: 137 - protein, 98 aa, Homo sapiens
NFMLTQPHSVSESPGKTVTISCTRSSGSIASNYVQWYQQRPGSSPTTVIYEDNQRPSGVPDRFSGSIDSSSNSASLTISGLKTEDEADYYCQSYDSSN

SEQ ID NO: 138 - protein, 98 aa, Homo sapiens
QTVVTQEPSLTVSPGGTVTLTCASSTGAVTSGYYPNWFQQKPGQAPRALIYSTSNKHSWTPARFSGSLLGGKAALTLSGVQPEDEAEYYCLLYYGGAQ

SEQ ID NO: 139 - protein, 98 aa, Homo sapiens
QAVVTQEPSLTVSPGGTVTLTCGSSTGAVTSGHYPYWFQQKPGQAPRTLIYDTSNKHSWTPARFSGSLLGGKAALTLSGAQPEDEAEYYCLLSYSGAR

SEQ ID NO: 140 - protein, 98 aa, Homo sapiens
QTVVTQEPSFSVSPGGTVTLTCGLSSGSVSTSYYPSWYQQTPGQAPRTLIYSTNTRSSGVPDRFSGSILGNKAALTITGAQADDESDYYCVLYMGSGI

SEQ ID NO: 141 - protein, 104 aa, Homo sapiens
QPVLTQPPSASASLGASVTLTCTLSSGYSNYKVDWYQQRPGKGPRFVMRVGTGGIVGSKGDGIPDRFSVLGSGLNRYLTIKNIQEEDESDYHCGADHGSGSNFV

SEQ ID NO: 142 - protein, 98 aa, Homo sapiens
QAGLTQPPSVSKGLRQTATLTCTGNSNNVGNQGAAWLQQHQGHPPKLLSYRNNNRPSGISERLSASRSGNTASLTITGLQPEDEADYYCSAWDSSLSA

SEQ ID NO: 143 - protein, 104 aa, Homo sapiens
RPVLTQPPSLSASPGATARLPCTLSSDLSVGGKNMFWYQQKPGSSPRLFLYHYSDSDKQLGPGVPSRVSGSKETSSNTAFLLISGLQPEDEADYYCQVYESSAN

SEQ ID NO: 144 - protein, 112 aa, Homo sapiens
PREBQPVLHQPPAMSSALGTTIRLTCTLRNDHDIGVYSVYWYQQRPGHPPRFLLRYFSQSDQSQGPQVPPRFSGSQDVARNRGYLSISELQPEDEAMYYCAMGARSSEKEER

SEQ ID NO: 145 - protein, 9 aa, Artificial
  Synthetic
YWPEPVTVS

SEQ ID NO: 146 - protein, 9 aa, Artificial
  Synthetic
YFPSPVTVS

SEQ ID NO: 147 - protein, 9 aa, Artificial
  Synthetic
YFPNPVTVS

SEQ ID NO: 148 - protein, 9 aa, Artificial
  Synthetic
YFPEPVSIK

SEQ ID NO: 149 - protein, 9 aa, Artificial
  Synthetic
YFPEPVTTT

SEQ ID NO: 150 - protein, 9 aa, Artificial
  Synthetic
YFPEPVTTA

SEQ ID NO: 151 - protein, 9 aa, Artificial
  Synthetic
YFPEPVTTG

SEQ ID NO: 152 - protein, 9 aa, Artificial
  Synthetic
YFPEPVTTN

SEQ ID NO: 153 - protein, 9 aa, Artificial
  Synthetic
YFPEPVTTD

SEQ ID NO: 154 - protein, 9 aa, Artificial
  Synthetic
YFPEPVTTE

SEQ ID NO: 155 - protein, 9 aa, Artificial
  Synthetic
YFPEPVTTK

SEQ ID NO: 156 - protein, 9 aa, Artificial
  Synthetic
YFPEPVTAK

SEQ ID NO: 157 - protein, 9 aa, Artificial
  Synthetic
YFPEPVTMK

SEQ ID NO: 158 - protein, 9 aa, Artificial
  Synthetic
YFPEPVTIK

SEQ ID NO: 159 - protein, 9 aa, Artificial
  Synthetic
YFPEPVTLK

SEQ ID NO: 160 - protein, 9 aa, Artificial
  Synthetic
YFPEPVTVT

SEQ ID NO: 161 - protein, 9 aa, Artificial
  Synthetic
YFPEPVTVA

SEQ ID NO: 162 - protein, 9 aa, Artificial
  Synthetic
YFPEPVTVG

SEQ ID NO: 163 - protein, 9 aa, Artificial
  Synthetic
YFPEPVTVN

SEQ ID NO: 164 - protein, 9 aa, Artificial
  Synthetic
YFPEPVTVD

SEQ ID NO: 165 - protein, 9 aa, Artificial
  Synthetic
YFPEPVTVE

SEQ ID NO: 166 - protein, 9 aa, Artificial
  Synthetic
YFPEPVTVK

SEQ ID NO: 167 - protein, 9 aa, Artificial
  Synthetic
MILSRTPEV

SEQ ID NO: 168 - protein, 9 aa, Artificial
  Synthetic
MIVSRTPEV

SEQ ID NO: 169 - protein, 9 aa, Artificial
  Synthetic
LMMTRTPEV

SEQ ID NO: 170 - protein, 9 aa, Artificial
  Synthetic
LMMARTPEV

SEQ ID NO: 171 - protein, 9 aa, Artificial
  Synthetic
LMITRTPEV

SEQ ID NO: 172 - protein, 9 aa, Artificial
  Synthetic
LMIARTPEV

SEQ ID NO: 173 - protein, 9 aa, Artificial
  Synthetic
LMISRSPEV

SEQ ID NO: 174 - protein, 9 aa, Artificial
  Synthetic
LMISRAPEV

SEQ ID NO: 175 - protein, 9 aa, Artificial
  Synthetic
LMISRNPEV

SEQ ID NO: 176 - protein, 9 aa, Artificial
  Synthetic
LMISRTPST

SEQ ID NO: 177 - protein, 9 aa, Artificial
  Synthetic
LMISRTPNT

SEQ ID NO: 178 - protein, 9 aa, Artificial
  Synthetic
LMISRTPDT

SEQ ID NO: 179 - protein, 9 aa, Artificial
  Synthetic
LMISRTPQT

SEQ ID NO: 180 - protein, 9 aa, Artificial
  Synthetic
LMISRTPHT

SEQ ID NO: 181 - protein, 9 aa, Artificial
  Synthetic
LMISRTPRT

SEQ ID NO: 182 - protein, 9 aa, Artificial
  Synthetic
LMISRTPKT

SEQ ID NO: 183 - protein, 9 aa, Artificial
  Synthetic
LMISRTPET

SEQ ID NO: 184 - protein, 9 aa, Artificial
  Synthetic
WHTDGVEVH

SEQ ID NO: 185 - protein, 9 aa, Artificial
  Synthetic
WHADGVEVH

SEQ ID NO: 186 - protein, 9 aa, Artificial
  Synthetic
WYTDGVEVH

SEQ ID NO: 187 - protein, 9 aa, Artificial
  Synthetic
WYADGVEVH

SEQ ID NO: 188 - protein, 9 aa, Artificial
  Synthetic
WYVSGVEVH

SEQ ID NO: 189 - protein, 9 aa, Artificial
  Synthetic
WYVNGVEVH

SEQ ID NO: 190 - protein, 9 aa, Artificial
  Synthetic
WYVESIEVH

SEQ ID NO: 191 - protein, 9 aa, Artificial
  Synthetic
WYVDGVSVH

SEQ ID NO: 192 - protein, 9 aa, Artificial
  Synthetic
WYVDGVETN

SEQ ID NO: 193 - protein, 9 aa, Artificial
  Synthetic
WYVDGVETE

SEQ ID NO: 194 - protein, 9 aa, Artificial
  Synthetic
WYVDGVETR

SEQ ID NO: 195 - protein, 9 aa, Artificial
  Synthetic
WYVDGVETY

SEQ ID NO: 196 - protein, 9 aa, Artificial
  Synthetic
WYVDGVEAY

SEQ ID NO: 197 - protein, 9 aa, Artificial
  Synthetic
WYVDGVEMY

SEQ ID NO: 198 - protein, 9 aa, Artificial
  Synthetic
WYVDGVEIY

SEQ ID NO: 199 - protein, 9 aa, Artificial
  Synthetic
WYVDGVELY

SEQ ID NO: 200 - protein, 9 aa, Artificial
  Synthetic
WYVDGVEVN

SEQ ID NO: 201 - protein, 9 aa, Artificial
  Synthetic
WYVDGVEVE

SEQ ID NO: 202 - protein, 9 aa, Artificial
  Synthetic
WYVDGVEVR

SEQ ID NO: 203 - protein, 9 aa, Artificial
  Synthetic
WYVDGVEVY

SEQ ID NO: 204 - protein, 9 aa, Artificial
  Synthetic
YNTVSVLTV

SEQ ID NO: 205 - protein, 9 aa, Artificial
  Synthetic
YNAVSVLTV

SEQ ID NO: 206 - protein, 9 aa, Artificial
  Synthetic
FNTVSVLTV

SEQ ID NO: 207 - protein, 9 aa, Artificial
  Synthetic
FNAVSVLTV

SEQ ID NO: 208 - protein, 9 aa, Artificial
  Synthetic
VDVLTVLHQ

SEQ ID NO: 209 - protein, 9 aa, Artificial
  Synthetic
VSVLTVLHN

SEQ ID NO: 210 - protein, 9 aa, Artificial
  Synthetic
VSVLTVLHD

SEQ ID NO: 211 - protein, 9 aa, Artificial
  Synthetic
VSVLTVLHE

SEQ ID NO: 212 - protein, 9 aa, Artificial
  Synthetic
VSVLTVLHR

SEQ ID NO: 213 - protein, 9 aa, Artificial
  Synthetic
VSVLTVLHK

SEQ ID NO: 214 - protein, 9 aa, Artificial
  Synthetic
VSVLTVLHM

SEQ ID NO: 215 - protein, 9 aa, Artificial
  Synthetic
LHNHYSSKS

SEQ ID NO: 216 - protein, 9 aa, Artificial
  Synthetic
LHNHYTERK

SEQ ID NO: 217 - protein, 9 aa, Artificial
  Synthetic
LHNHYTQSD

SEQ ID NO: 218 - protein, 9 aa, Artificial
  Synthetic
LHNHYTQSE

SEQ ID NO: 219 - protein, 9 aa, Artificial
  Synthetic
LHNHYTQND

SEQ ID NO: 220 - protein, 9 aa, Artificial
  Synthetic
LHNHYTQNE

SEQ ID NO: 221 - protein, 9 aa, Artificial
  Synthetic
LHNHYTQED

SEQ ID NO: 222 - protein, 9 aa, Artificial
  Synthetic
LHNHYTQEE

SEQ ID NO: 223 - protein, 9 aa, Artificial
  Synthetic
LHNHYTQQD

SEQ ID NO: 224 - protein, 9 aa, Artificial
  Synthetic
LHNHYTQQE

SEQ ID NO: 225 - protein, 9 aa, Artificial
  Synthetic
LHNHYTQRD

SEQ ID NO: 226 - protein, 9 aa, Artificial
  Synthetic
LHNHYTQRE

SEQ ID NO: 227 - protein, 9 aa, Artificial
  Synthetic
LHNHYTQKD

SEQ ID NO: 228 - protein, 9 aa, Artificial
  Synthetic
LHNHYTQKE

SEQ ID NO: 229 - protein, 9 aa, Artificial
  Synthetic
LEFNRTPEV

SEQ ID NO: 230 - protein, 9 aa, Artificial
  Synthetic
LEINRNPEV

SEQ ID NO: 231 - protein, 9 aa, Artificial
  Synthetic
LEANRTPEV

SEQ ID NO: 232 - protein, 9 aa, Artificial
  Synthetic
LELNRTPEV

SEQ ID NO: 233 - protein, 9 aa, Artificial
  Synthetic
LQANRTPEV

SEQ ID NO: 234 - protein, 9 aa, Artificial
  Synthetic
LEMTRTPEV

SEQ ID NO: 235 - protein, 9 aa, Artificial
  Synthetic
LMFNRNPEV

SEQ ID NO: 236 - protein, 9 aa, Artificial
  Synthetic
LEISRNPEV

SEQ ID NO: 237 - protein, 9 aa, Artificial
  Synthetic
LLANRTPEV

SEQ ID NO: 238 - protein, 9 aa, Artificial
  Synthetic
LEVNRTPEV

SEQ ID NO: 239 - protein, 9 aa, Artificial
  Synthetic
LMANRNPEV

SEQ ID NO: 240 - protein, 9 aa, Artificial
  Synthetic
LKANRTPEV

SEQ ID NO: 241 - protein, 9 aa, Artificial
  Synthetic
LEASRTPEV

SEQ ID NO: 242 - protein, 9 aa, Artificial
  Synthetic
LEISRSPEV

SEQ ID NO: 243 - protein, 9 aa, Artificial
  Synthetic
LEITRNPEV

SEQ ID NO: 244 - protein, 9 aa, Artificial
  Synthetic
LEFTRTPEV

SEQ ID NO: 245 - protein, 9 aa, Artificial
  Synthetic
LMANRTPEV

SEQ ID NO: 246 - protein, 9 aa, Artificial
  Synthetic
LMMTRNPEV

SEQ ID NO: 247 - protein, 9 aa, Artificial
  Synthetic
LEMARTPEV

SEQ ID NO: 248 - protein, 9 aa, Artificial
  Synthetic
LMANRSPEV

SEQ ID NO: 249 - protein, 9 aa, Artificial
  Synthetic
LMFSRNPEV

SEQ ID NO: 250 - protein, 9 aa, Artificial
  Synthetic
LMVNRNPEV

SEQ ID NO: 251 - protein, 9 aa, Artificial
  Synthetic
LEITRTPEV

SEQ ID NO: 252 - protein, 9 aa, Artificial
  Synthetic
LEATRTPEV

SEQ ID NO: 253 - protein, 9 aa, Artificial
  Synthetic
LQFTRTPEV

SEQ ID NO: 254 - protein, 9 aa, Artificial
  Synthetic
LEITRSPEV

SEQ ID NO: 255 - protein, 9 aa, Artificial
  Synthetic
LMASRNPEV

SEQ ID NO: 256 - protein, 9 aa, Artificial
  Synthetic
LEVSRTPEV

SEQ ID NO: 257 - protein, 9 aa, Artificial
  Synthetic
LELTRTPEV

SEQ ID NO: 258 - protein, 9 aa, Artificial
  Synthetic
LLITRNPEV

SEQ ID NO: 259 - protein, 9 aa, Artificial
  Synthetic
LQATRTPEV

SEQ ID NO: 260 - protein, 9 aa, Artificial
  Synthetic
LMLSRNPEV

SEQ ID NO: 261 - protein, 9 aa, Artificial
  Synthetic
LEIARNPEV

SEQ ID NO: 262 - protein, 9 aa, Artificial
  Synthetic
LLFTRTPEV

SEQ ID NO: 263 - protein, 9 aa, Artificial
  Synthetic
LMFTRNPEV

SEQ ID NO: 264 - protein, 9 aa, Artificial
  Synthetic
LEFARTPEV

SEQ ID NO: 265 - protein, 9 aa, Artificial
  Synthetic
LKITRNPEV

SEQ ID NO: 266 - protein, 9 aa, Artificial
  Synthetic
LMASRSPEV

SEQ ID NO: 267 - protein, 9 aa, Artificial
  Synthetic
LEVTRTPEV

SEQ ID NO: 268 - protein, 9 aa, Artificial
  Synthetic
LLATRTPEV

SEQ ID NO: 269 - protein, 9 aa, Artificial
  Synthetic
LKFTRTPEV

SEQ ID NO: 270 - protein, 9 aa, Artificial
  Synthetic
LMITRNPEV

SEQ ID NO: 271 - protein, 9 aa, Artificial
  Synthetic
LMATRNPEV

SEQ ID NO: 272 - protein, 9 aa, Artificial
  Synthetic
LMVSRNPEV

SEQ ID NO: 273 - protein, 9 aa, Artificial
  Synthetic
LEAARTPEV

SEQ ID NO: 274 - protein, 9 aa, Artificial
  Synthetic
LEISRAPEV

SEQ ID NO: 275 - protein, 9 aa, Artificial
  Synthetic
LMFTRTPEV

SEQ ID NO: 276 - protein, 9 aa, Artificial
  Synthetic
LQVTRTPEV

SEQ ID NO: 277 - protein, 9 aa, Artificial
  Synthetic
LLLTRTPEV

SEQ ID NO: 278 - protein, 9 aa, Artificial
  Synthetic
LMFTRSPEV

SEQ ID NO: 279 - protein, 9 aa, Artificial
  Synthetic
LKATRTPEV

SEQ ID NO: 280 - protein, 9 aa, Artificial
  Synthetic
LMLTRNPEV

SEQ ID NO: 281 - protein, 9 aa, Artificial
  Synthetic
LELARTPEV

SEQ ID NO: 282 - protein, 9 aa, Artificial
  Synthetic
LQAARTPEV

SEQ ID NO: 283 - protein, 9 aa, Artificial
  Synthetic
LMATRTPEV

SEQ ID NO: 284 - protein, 9 aa, Artificial
  Synthetic
LMATRSPEV

SEQ ID NO: 285 - protein, 9 aa, Artificial
  Synthetic
LMVSRSPEV

SEQ ID NO: 286 - protein, 9 aa, Artificial
  Synthetic
LEITRVPEV

SEQ ID NO: 287 - protein, 9 aa, Artificial
  Synthetic
LMFARNPEV

SEQ ID NO: 288 - protein, 9 aa, Artificial
  Synthetic
LLVTRTPEV

SEQ ID NO: 289 - protein, 9 aa, Artificial
  Synthetic
LMVTRNPEV

SEQ ID NO: 290 - protein, 9 aa, Artificial
  Synthetic
LEITRAPEV

SEQ ID NO: 291 - protein, 9 aa, Artificial
  Synthetic
LEVARTPEV

SEQ ID NO: 292 - protein, 9 aa, Artificial
  Synthetic
LKVTRTPEV

SEQ ID NO: 293 - protein, 9 aa, Artificial
  Synthetic
LMAARNPEV

SEQ ID NO: 294 - protein, 9 aa, Artificial
  Synthetic
LLAARTPEV

SEQ ID NO: 295 - protein, 9 aa, Artificial
  Synthetic
LMVTRTPEV

SEQ ID NO: 296 - protein, 9 aa, Artificial
  Synthetic
LMVTRSPEV

SEQ ID NO: 297 - protein, 9 aa, Artificial
  Synthetic
LMASRAPEV

SEQ ID NO: 298 - protein, 9 aa, Artificial
  Synthetic
LMAARTPEV

SEQ ID NO: 299 - protein, 9 aa, Artificial
  Synthetic
LKAARTPEV

SEQ ID NO: 300 - protein, 9 aa, Artificial
  Synthetic
LMAARSPEV

SEQ ID NO: 301 - protein, 9 aa, Artificial
  Synthetic
YDMDSILTV

SEQ ID NO: 302 - protein, 9 aa, Artificial
  Synthetic
YDVDSILTV

SEQ ID NO: 303 - protein, 9 aa, Artificial
  Synthetic
YDVDSVLTV

SEQ ID NO: 304 - protein, 9 aa, Artificial
  Synthetic
YEVDSILTV

SEQ ID NO: 305 - protein, 9 aa, Artificial
  Synthetic
YDTESILTV

SEQ ID NO: 306 - protein, 9 aa, Artificial
  Synthetic
YDTESVLTV

SEQ ID NO: 307 - protein, 9 aa, Artificial
  Synthetic
YDTDSILTV

SEQ ID NO: 308 - protein, 9 aa, Artificial
  Synthetic
YDEESILTV

SEQ ID NO: 309 - protein, 9 aa, Artificial
  Synthetic
YDAESILTV

SEQ ID NO: 310 - protein, 9 aa, Artificial
  Synthetic
YDTDSVLTV

SEQ ID NO: 311 - protein, 9 aa, Artificial
  Synthetic
YDMDSHLTV

SEQ ID NO: 312 - protein, 9 aa, Artificial
  Synthetic
YDEESVLTV

SEQ ID NO: 313 - protein, 9 aa, Artificial
  Synthetic
YDEDSILTV

SEQ ID NO: 314 - protein, 9 aa, Artificial
  Synthetic
YDAESVLTV

SEQ ID NO: 315 - protein, 9 aa, Artificial
  Synthetic
YDADSILTV

SEQ ID NO: 316 - protein, 9 aa, Artificial
  Synthetic
YDDESILTV

SEQ ID NO: 317 - protein, 9 aa, Artificial
  Synthetic
YDEDSVLTV

SEQ ID NO: 318 - protein, 9 aa, Artificial
  Synthetic
YDVDSHLTV

SEQ ID NO: 319 - protein, 9 aa, Artificial
  Synthetic
YDTESTLTV

SEQ ID NO: 320 - protein, 9 aa, Artificial
  Synthetic
YDADSVLTV

SEQ ID NO: 321 - protein, 9 aa, Artificial
  Synthetic
YDVTSTLTV

SEQ ID NO: 322 - protein, 9 aa, Artificial
  Synthetic
YETESILTV

SEQ ID NO: 323 - protein, 9 aa, Artificial
  Synthetic
YDDDSILTV

SEQ ID NO: 324 - protein, 9 aa, Artificial
  Synthetic
YDDESVLTV

SEQ ID NO: 325 - protein, 9 aa, Artificial
  Synthetic
YDDDSVLTV

SEQ ID NO: 326 - protein, 9 aa, Artificial
  Synthetic
YQEESILTV

SEQ ID NO: 327 - protein, 9 aa, Artificial
  Synthetic
YETDSILTV

SEQ ID NO: 328 - protein, 9 aa, Artificial
  Synthetic
YDIDSILTV

SEQ ID NO: 329 - protein, 9 aa, Artificial
  Synthetic
YDEESTLTV

SEQ ID NO: 330 - protein, 9 aa, Artificial
  Synthetic
YDTESHLTV

SEQ ID NO: 331 - protein, 9 aa, Artificial
  Synthetic
YDTDSTLTV

SEQ ID NO: 332 - protein, 9 aa, Artificial
  Synthetic
YDAESTLTV

SEQ ID NO: 333 - protein, 9 aa, Artificial
  Synthetic
YQEDSILTV

SEQ ID NO: 334 - protein, 9 aa, Artificial
  Synthetic
YEAESILTV

SEQ ID NO: 335 - protein, 9 aa, Artificial
  Synthetic
YEEESILTV

SEQ ID NO: 336 - protein, 9 aa, Artificial
  Synthetic
YQDESILTV

SEQ ID NO: 337 - protein, 9 aa, Artificial
  Synthetic
YEEDSILTV

SEQ ID NO: 338 - protein, 9 aa, Artificial
  Synthetic
YEADSILTV

SEQ ID NO: 339 - protein, 9 aa, Artificial
  Synthetic
YEEESVLTV

SEQ ID NO: 340 - protein, 9 aa, Artificial
  Synthetic
YDEDSTLTV

SEQ ID NO: 341 - protein, 9 aa, Artificial
  Synthetic
YDDESTLTV

SEQ ID NO: 342 - protein, 9 aa, Artificial
  Synthetic
YEMDSHLTV

SEQ ID NO: 343 - protein, 9 aa, Artificial
  Synthetic
YEEDSVLTV

SEQ ID NO: 344 - protein, 9 aa, Artificial
  Synthetic
YDEESHLTV

SEQ ID NO: 345 - protein, 9 aa, Artificial
  Synthetic
YQDDSILTV

SEQ ID NO: 346 - protein, 9 aa, Artificial
  Synthetic
YDADSTLTV

SEQ ID NO: 347 - protein, 9 aa, Artificial
  Synthetic
YDAESHLTV

SEQ ID NO: 348 - protein, 9 aa, Artificial
  Synthetic
YEDESILTV

SEQ ID NO: 349 - protein, 9 aa, Artificial
  Synthetic
YEVDSHLTV

SEQ ID NO: 350 - protein, 9 aa, Artificial
  Synthetic
YEDDSILTV

SEQ ID NO: 351 - protein, 9 aa, Artificial
  Synthetic
YQDDSVLTV

SEQ ID NO: 352 - protein, 9 aa, Artificial
  Synthetic
YDDDSTLTV

SEQ ID NO: 353 - protein, 9 aa, Artificial
  Synthetic
YEDESVLTV

SEQ ID NO: 354 - protein, 9 aa, Artificial
  Synthetic
YDDESHLTV

SEQ ID NO: 355 - protein, 9 aa, Artificial
  Synthetic
YEDDSVLTV

SEQ ID NO: 356 - protein, 9 aa, Artificial
  Synthetic
YDTTSILTV

SEQ ID NO: 357 - protein, 9 aa, Artificial
  Synthetic
YQTESHLTV

SEQ ID NO: 358 - protein, 9 aa, Artificial
  Synthetic
YDTTSVLTV

SEQ ID NO: 359 - protein, 9 aa, Artificial
  Synthetic
YETESHLTV

SEQ ID NO: 360 - protein, 9 aa, Artificial
  Synthetic
YDETSILTV

SEQ ID NO: 361 - protein, 9 aa, Artificial
  Synthetic
YDETSVLTV

SEQ ID NO: 362 - protein, 9 aa, Artificial
  Synthetic
YDATSILTV

SEQ ID NO: 363 - protein, 9 aa, Artificial
  Synthetic
YQEESHLTV

SEQ ID NO: 364 - protein, 9 aa, Artificial
  Synthetic
YQAESHLTV

SEQ ID NO: 365 - protein, 9 aa, Artificial
  Synthetic
YDATSVLTV

SEQ ID NO: 366 - protein, 9 aa, Artificial
  Synthetic
FFEYSLLTK

SEQ ID NO: 367 - protein, 9 aa, Artificial
  Synthetic
FFEYSILTK

SEQ ID NO: 368 - protein, 9 aa, Artificial
  Synthetic
FFEYSMLTK

SEQ ID NO: 369 - protein, 9 aa, Artificial
  Synthetic
FYEYSLLTK

SEQ ID NO: 370 - protein, 9 aa, Artificial
  Synthetic
FYEYSILTK

SEQ ID NO: 371 - protein, 9 aa, Artificial
  Synthetic
FFEYSQLTK

SEQ ID NO: 372 - protein, 9 aa, Artificial
  Synthetic
FFEYSMLTQ

SEQ ID NO: 373 - protein, 9 aa, Artificial
  Synthetic
LHNHYTEKE

SEQ ID NO: 374 - protein, 9 aa, Artificial
  Synthetic
LHSHYTEKE

SEQ ID NO: 375 - protein, 9 aa, Artificial
  Synthetic
LHTHYTEKE

SEQ ID NO: 376 - protein, 9 aa, Artificial
  Synthetic
LHNHYSEKE

SEQ ID NO: 377 - protein, 9 aa, Artificial
  Synthetic
LHTHYAEKS

SEQ ID NO: 378 - protein, 9 aa, Artificial
  Synthetic
LHNHYAEKR

SEQ ID NO: 379 - protein, 9 aa, Artificial
  Synthetic
LHSHYTKKE

SEQ ID NO: 380 - protein, 9 aa, Artificial
  Synthetic
LHSHYSEKE

SEQ ID NO: 381 - protein, 9 aa, Artificial
  Synthetic
LHSHYAEKQ

SEQ ID NO: 382 - protein, 9 aa, Artificial
  Synthetic
LHTHYTKKE

SEQ ID NO: 383 - protein, 9 aa, Artificial
  Synthetic
MHSHYAEKS

SEQ ID NO: 384 - protein, 9 aa, Artificial
  Synthetic
LHTHYAEKE

SEQ ID NO: 385 - protein, 9 aa, Artificial
  Synthetic
MHNHYAEKE

SEQ ID NO: 386 - protein, 9 aa, Artificial
  Synthetic
LHSHYSEKR

SEQ ID NO: 387 - protein, 9 aa, Artificial
  Synthetic
LHAHYAEKS

SEQ ID NO: 388 - protein, 9 aa, Artificial
  Synthetic
LHAHYTEKR

SEQ ID NO: 389 - protein, 9 aa, Artificial
  Synthetic
LHNHYIEKE

SEQ ID NO: 390 - protein, 9 aa, Artificial
  Synthetic
LHNHYAEKK

SEQ ID NO: 391 - protein, 9 aa, Artificial
  Synthetic
MHNHYAQKE

SEQ ID NO: 392 - protein, 9 aa, Artificial
  Synthetic
MHTHYAEKS

SEQ ID NO: 393 - protein, 9 aa, Artificial
  Synthetic
LHSHYAQKR

SEQ ID NO: 394 - protein, 9 aa, Artificial
  Synthetic
LHTHYSEKR

SEQ ID NO: 395 - protein, 9 aa, Artificial
  Synthetic
LHSHYTAKE

SEQ ID NO: 396 - protein, 9 aa, Artificial
  Synthetic
LHNHYAEKT

SEQ ID NO: 397 - protein, 9 aa, Artificial
  Synthetic
LHNHYIEKR

SEQ ID NO: 398 - protein, 9 aa, Artificial
  Synthetic
LHSHYAEKA

SEQ ID NO: 399 - protein, 9 aa, Artificial
  Synthetic
LHAHYTKKE

SEQ ID NO: 400 - protein, 9 aa, Artificial
  Synthetic
LHTHYAQKR

SEQ ID NO: 401 - protein, 9 aa, Artificial
  Synthetic
LHAHYSEKE

SEQ ID NO: 402 - protein, 9 aa, Artificial
  Synthetic
LHSHYIEKE

SEQ ID NO: 403 - protein, 9 aa, Artificial
  Synthetic
LHTHYTAKE

SEQ ID NO: 404 - protein, 9 aa, Artificial
  Synthetic
MHSHYAQKE

SEQ ID NO: 405 - protein, 9 aa, Artificial
  Synthetic
LHTHYAKKE

SEQ ID NO: 406 - protein, 9 aa, Artificial
  Synthetic
LHTHYAEKA

SEQ ID NO: 407 - protein, 9 aa, Artificial
  Synthetic
LHAHYAEKQ

SEQ ID NO: 408 - protein, 9 aa, Artificial
  Synthetic
LHAHYAQKE

SEQ ID NO: 409 - protein, 9 aa, Artificial
  Synthetic
LHTHYSEKA

SEQ ID NO: 410 - protein, 9 aa, Artificial
  Synthetic
LHAHYSQKE

SEQ ID NO: 411 - protein, 9 aa, Artificial
  Synthetic
LHAHYAEKR

SEQ ID NO: 412 - protein, 9 aa, Artificial
  Synthetic
LHTHYIEKE

SEQ ID NO: 413 - protein, 9 aa, Artificial
  Synthetic
LHSHYAEKT

SEQ ID NO: 414 - protein, 9 aa, Artificial
  Synthetic
LHSHYIEKR

SEQ ID NO: 415 - protein, 9 aa, Artificial
  Synthetic
LHSHYSEKT

SEQ ID NO: 416 - protein, 9 aa, Artificial
  Synthetic
MHTHYAQKE

SEQ ID NO: 417 - protein, 9 aa, Artificial
  Synthetic
LHAHYTEKT

SEQ ID NO: 418 - protein, 9 aa, Artificial
  Synthetic
LHTHYSEKK

SEQ ID NO: 419 - protein, 9 aa, Artificial
  Synthetic
MHTHYSQKE

SEQ ID NO: 420 - protein, 248 aa, Artificial
  Synthetic
CNVNHKPSNTKVDKKVEPKSCDKTHTCPPCPAPELLGGPSVFLFPPKPKDTLMISRTPEVTCVVADVSHEDPEVKFNWYVDGVEVHNAKTKPREEQYNSTYRVVSVLTVLHQDWLNGKEYKCKVSNKALPAPIEKTISKAKGQPREPQVYTLPPSRDELTKNQVSLTCLVKGFYPSDIAVEWESNGQPENNYKTTPPVLDSDGSFFLYSKLTVDKSRWQQGNVFSCSVMHEALHNHYTQKSLSLSPGK

SEQ ID NO: 421 - protein, 248 aa, Artificial
  Synthetic
CNVNHKPSNTKVDKKVEPKSCDKTHTCPPCPAPELLGGPSVFLFPPKPKDTLMISRTPEVTCVVLDVSHEDPEVKFNWYVDGVEVHNAKTKPREEQYNSTYRVVSVLTVLHQDWLNGKEYKCKVSNKALPAPIEKTISKAKGQPREPQVYTLPPSRDELTKNQVSLTCLVKGFYPSDIAVEWESNGQPENNYKTTPPVLDSDGSFFLYSKLTVDKSRWQQGNVFSCSVMHEALHNHYTQKSLSLSPGK

SEQ ID NO: 422 - protein, 248 aa, Artificial
  Synthetic
CNVNHKPSNTKVDKKVEPKSCDKTHTCPPCPAPELLGGPSVFLFPPKPKDTLMISRTPEVTCVVIDVSHEDPEVKFNWYVDGVEVHNAKTKPREEQYNSTYRVVSVLTVLHQDWLNGKEYKCKVSNKALPAPIEKTISKAKGQPREPQVYTLPPSRDELTKNQVSLTCLVKGFYPSDIAVEWESNGQPENNYKTTPPVLDSDGSFFLYSKLTVDKSRWQQGNVFSCSVMHEALHNHYTQKSLSLSPGK

SEQ ID NO: 423 - protein, 248 aa, Artificial
  Synthetic
CNVNHKPSNTKVDKKVEPKSCDKTHTCPPCPAPELLGGPSVWLFPPKPKDTLMISRTPEVTCVVVDVSHEDPEVKFNWYVDGVEVHNAKTKPREEQYNSTYRVVSVLTVLHQDWLNGKEYKCKVSNKALPAPIEKTISKAKGQPREPQVYTLPPSRDELTKNQVSLTCLVKGFYPSDIAVEWESNGQPENNYKTTPPVLDSDGSFFLYSKLTVDKSRWQQGNVFSCSVMHEALHNHYTQKSLSLSPGK

SEQ ID NO: 424 - protein, 248 aa, Artificial
  Synthetic
CNVNHKPSNTKVDKKVEPKSCDKTHTCPPCPAPELLGGPSVLLFPPKPKDTLMISRTPEVTCVVVDVSHEDPEVKFNWYVDGVEVHNAKTKPREEQYNSTYRVVSVLTVLHQDWLNGKEYKCKVSNKALPAPIEKTISKAKGQPREPQVYTLPPSRDELTKNQVSLTCLVKGFYPSDIAVEWESNGQPENNYKTTPPVLDSDGSFFLYSKLTVDKSRWQQGNVFSCSVMHEALHNHYTQKSLSLSPGK

SEQ ID NO: 425 - protein, 248 aa, Artificial
  Synthetic
CNVNHKPSNTKVDKKVEPKSCDKTHTCPPCPAPELLGGPSVFLWPPKPKDTLMISRTPEVTCVVVDVSHEDPEVKFNWYVDGVEVHNAKTKPREEQYNSTYRVVSVLTVLHQDWLNGKEYKCKVSNKALPAPIEKTISKAKGQPREPQVYTLPPSRDELTKNQVSLTCLVKGFYPSDIAVEWESNGQPENNYKTTPPVLDSDGSFFLYSKLTVDKSRWQQGNVFSCSVMHEALHNHYTQKSLSLSPGK

SEQ ID NO: 426 - protein, 248 aa, Artificial
  Synthetic
CNVNHKPSNTKVDKKVEPKSCDKTHTCPPCPAPELLGGPSVFLLPPKPKDTLMISRTPEVTCVVVDVSHEDPEVKFNWYVDGVEVHNAKTKPREEQYNSTYRVVSVLTVLHQDWLNGKEYKCKVSNKALPAPIEKTISKAKGQPREPQVYTLPPSRDELTKNQVSLTCLVKGFYPSDIAVEWESNGQPENNYKTTPPVLDSDGSFFLYSKLTVDKSRWQQGNVFSCSVMHEALHNHYTQKSLSLSPGK

SEQ ID NO: 427 - protein, 248 aa, Artificial
  Synthetic
CNVNHKPSNTKVDKKVEPKSCDKTHTCPPCPAPELLGGPSVLLLPPKPKDTLMISRTPEVTCIVIDVSHEDPEVKFNWYVDGVEVHNAKTKPREEQYNSTYRVVSVLTVLHQDWLNGKEYKCKVSNKALPAPIEKTISKAKGQPREPQVYTLPPSRDELTKNQVSLTCLVKGFYPSDIAVEWESNGQPENNYKTTPPVLDSDGSFFLYSKLTVDKSRWQQGNVFSCSVMHEALHNHYTQKSLSLSPGK

SEQ ID NO: 428 - protein, 248 aa, Artificial
  Synthetic
CNVNHKPSNTKVDKKVEPKSCDKTHTCPPCPAPELLGGPSVWLWPPKPKDTLMISRTPEVTCVVVDVSHEDPEVKFNWYVDGVEVHNAKTKPREEQYNSTYRVVSVLTVLHQDWLNGKEYKCKVSNKALPAPIEKTISKAKGQPREPQVYTLPPSRDELTKNQVSLTCLVKGFYPSDIAVEWESNGQPENNYKTTPPVLDSDGSFFLYSKLTVDKSRWQQGNVFSCSVMHEALHNHYTQKSLSLSPGK

SEQ ID NO: 429 - protein, 248 aa, Artificial
  Synthetic
CNVNHKPSNTKVDKKVEPKSCDKTHTCPPCPAPELLGGPSVWLWPPKPKDTLMISRTPEVTCAVADVSHEDPEVKFNWYVDGVEVHNAKTKPREEQYNSTYRVVSVLTVLHQDWLNGKEYKCKVSNKALPAPIEKTISKAKGQPREPQVYTLPPSRDELTKNQVSLTCLVKGFYPSDIAVEWESNGQPENNYKTTPPVLDSDGSFFLYSKLTVDKSRWQQGNVFSCSVMHEALHNHYTQKSLSLSPGK

SEQ ID NO: 430 - protein, 248 aa, Artificial
  Synthetic
CNVNHKPSNTKVDKKVEPKSCDKTHTCPPCPAPELLGGPSVLLFPPKPKDTLMISRTPEVTCIVVDVSHEDPEVKFNWYVDGVEVHNAKTKPREEQYNSTYRVVSVLTVLHQDWLNGKEYKCKVSNKALPAPIEKTISKAKGQPREPQVYTLPPSRDELTKNQVSLTCLVKGFYPSDIAVEWESNGQPENNYKTTPPVLDSDGSFFLYSKLTVDKSRWQQGNVFSCSVMHEALHNHYTQKSLSLSPGK

SEQ ID NO: 431 - protein, 248 aa, Artificial; identical to SEQ ID NO: 422
  Synthetic

SEQ ID NO: 432 - protein, 248 aa, Artificial
  Synthetic
CNVNHKPSNTKVDKKVEPKSCDKTHTCPPCPAPELLGGPSVFLLPPKPKDTLMISRTPEVTCIVWDVSHEDPEVKFNWYVDGVEVHNAKTKPREEQYNSTYRVVSVLTVLHQDWLNGKEYKCKVSNKALPAPIEKTISKAKGQPREPQVYTLPPSRDELTKNQVSLTCLVKGFYPSDIAVEWESNGQPENNYKTTPPVLDSDGSFFLYSKLTVDKSRWQQGNVFSCSVMHEALHNHYTQKSLSLSPGK

SEQ ID NO: 433 - protein, 248 aa, Artificial
  Synthetic
CNVNHKPSNTKVDKKVEPKSCDKTHTCPPCPAPELLGGPSVYLYPPKPKDTLMISRTPEVTCTVTDVSHEDPEVKFNWYVDGVEVHNAKTKPREEQYNSTYRVVSVLTVLHQDWLNGKEYKCKVSNKALPAPIEKTISKAKGQPREPQVYTLPPSRDELTKNQVSLTCLVKGFYPSDIAVEWESNGQPENNYKTTPPVLDSDGSFFLYSKLTVDKSRWQQGNVFSCSVMHEALHNHYTQKSLSLSPGK

SEQ ID NO: 434 - protein, 248 aa, Artificial
  Synthetic
CNVNHKPSNTKVDKKVEPKSCDKTHTCPPCPAPELLGGPSVELRPPKPKDTLMISRTPEVTCEVRDVSHEDPEVKFNWYVDGVEVHNAKTKPREEQYNSTYRVVSVLTVLHQDWLNGKEYKCKVSNKALPAPIEKTISKAKGQPREPQVYTLPPSRDELTKNQVSLTCLVKGFYPSDIAVEWESNGQPENNYKTTPPVLDSDGSFFLYSKLTVDKSRWQQGNVFSCSVMHEALHNHYTQKSLSLSPGK

SEQ ID NO: 435 - protein, 248 aa, Artificial
  Synthetic
CNVNHKPSNTKVDKKVEPKSCDKTHTCPPCPAPELLGGPSVELQPPKPKDTLMISRTPEVTCTVEDVSHEDPEVKFNWYVDGVEVHNAKTKPREEQYNSTYRVVSVLTVLHQDWLNGKEYKCKVSNKALPAPIEKTISKAKGQPREPQVYTLPPSRDELTKNQVSLTCLVKGFYPSDIAVEWESNGQPENNYKTTPPVLDSDGSFFLYSKLTVDKSRWQQGNVFSCSVMHEALHNHYTQKSLSLSPGK

SEQ ID NO: 436 - protein, 248 aa, Artificial
  Synthetic
CNVNHKPSNTKVDKKVEPKSCDKTHTCPPCPAPELLGGPSVELQPPKPKDTLMISRTPEVTCTVRDVSHEDPEVKFNWYVDGVEVHNAKTKPREEQYNSTYRVVSVLTVLHQDWLNGKEYKCKVSNKALPAPIEKTISKAKGQPREPQVYTLPPSRDELTKNQVSLTCLVKGFYPSDIAVEWESNGQPENNYKTTPPVLDSDGSFFLYSKLTVDKSRWQQGNVFSCSVMHEALHNHYTQKSLSLSPGK

SEQ ID NO: 437 - protein, 248 aa, Artificial
  Synthetic
CNVNHKPSNTKVDKKVEPKSCDKTHTCPPCPAPELLGGPSVELYPPKPKDTLMISRTPEVTCTVRDVSHEDPEVKFNWYVDGVEVHNAKTKPREEQYNSTYRVVSVLTVLHQDWLNGKEYKCKVSNKALPAPIEKTISKAKGQPREPQVYTLPPSRDELTKNQVSLTCLVKGFYPSDIAVEWESNGQPENNYKTTPPVLDSDGSFFLYSKLTVDKSRWQQGNVFSCSVMHEALHNHYTQKSLSLSPGK

SEQ ID NO: 438 - protein, 248 aa, Artificial
  Synthetic
CNVNHKPSNTKVDKKVEPKSCDKTHTCPPCPAPELLGGPSVFLFPPKPKDTLMISRTPEVTCVVVDVSHEDPEVKFNWYVDGVEVHNAKTKPREEQYNSTYRVVSVLTVLHQDWLNGKEYKCKVSNKAMPAPIEKTISKAKGQPREPQVYTLPPSRDELTKNQVSLTCLVKGFYPSDIAVEWESNGQPENNYKTTPPVLDSDGSFFLYSKLTVDKSRWQQGNVFSCSVMHEALHNHYTQKSLSLSPGK

SEQ ID NO: 439 - protein, 248 aa, Artificial
  Synthetic
CNVNHKPSNTKVDKKVEPKSCDKTHTCPPCPAPELLGGPSVFLFPPKPKDTLMISRTPEVTCVVVDVSHEDPEVKFNWYVDGVEVHNAKTKPREEQYNSTYRVVSVLTVLHQDWLNGKEYKCKVSNKAEPAPIEKTISKAKGQPREPQVYTLPPSRDELTKNQVSLTCLVKGFYPSDIAVEWESNGQPENNYKTTPPVLDSDGSFFLYSKLTVDKSRWQQGNVFSCSVMHEALHNHYTQKSLSLSPGK

SEQ ID NO: 440 - protein, 248 aa, Artificial
  Synthetic
CNVNHKPSNTKVDKKVEPKSCDKTHTCPPCPAPELLGGPSVFLFPPKPKDTLMISRTPEVTCVVVDVSHEDPEVKFNWYVDGVEVHNAKTKPREEQYNSTYRVVSVLTVLHQDWLNGKEYKCKVSNKAFPAPIEKTISKAKGQPREPQVYTLPPSRDELTKNQVSLTCLVKGFYPSDIAVEWESNGQPENNYKTTPPVLDSDGSFFLYSKLTVDKSRWQQGNVFSCSVMHEALHNHYTQKSLSLSPGK

SEQ ID NO: 441 - protein, 248 aa, Artificial
  Synthetic
CNVNHKPSNTKVDKKVEPKSCDKTHTCPPCPAPELLGGPSVFLFPPKPKDTLMISRTPEVTCVVVDVSHEDPEVKFNWYVDGVEVHNAKTKPREEQYNSTYRVVSVLTVLHQDWLNGKEYKCKVSNKALPAPEEKTISKAKGQPREPQVYTLPPSRDELTKNQVSLTCLVKGFYPSDIAVEWESNGQPENNYKTTPPVLDSDGSFFLYSKLTVDKSRWQQGNVFSCSVMHEALHNHYTQKSLSLSPGK

SEQ ID NO: 442 - protein, 248 aa, Artificial
  Synthetic
CNVNHKPSNTKVDKKVEPKSCDKTHTCPPCPAPELLGGPSVFLFPPKPKDTLMISRTPEVTCVVVDVSHEDPEVKFNWYVDGVEVHNAKTKPREEQYNSTYRVVSVLTVLHQDWLNGKEYKCKVSNKAMPAPEEKTISKAKGQPREPQVYTLPPSRDELTKNQVSLTCLVKGFYPSDIAVEWESNGQPENNYKTTPPVLDSDGSFFLYSKLTVDKSRWQQGNVFSCSVMHEALHNHYTQKSLSLSPGK

SEQ ID NO: 443 - protein, 248 aa, Artificial
  Synthetic
CNVNHKPSNTKVDKKVEPKSCDKTHTCPPCPAPELLGGPSVFLFHPKPKDTLMISRTPEVTCVVVDVSHEDPEVKFNWYVDGVEVHNAKTKPREEQYNSTYRVVSVLTVLHQDWLNGKEYKCKVSNKALPAPIEKTISKAKGQPREPQVYTLPPSRDELTKNQVSLTCLVKGFYPSDIAVEWESNGQPENNYKTTPPVLDSDGSFFLYSKLTVDKSRWQQGNVFSCSVMHEALHNHYTQKSLSLSPGK

SEQ ID NO: 444 - protein, 248 aa, Artificial
  Synthetic
CNVNHKPSNTKVDKKVEPKSCDKTHTCPPCPAPELLGGPSVFLFPAKPKDTLMISRTPEVTCVVVDVSHEDPEVKFNWYVDGVEVHNAKTKPREEQYNSTYRVVSVLTVLHQDWLNGKEYKCKVSNKALPAPIEKTISKAKGQPREPQVYTLPPSRDELTKNQVSLTCLVKGFYPSDIAVEWESNGQPENNYKTTPPVLDSDGSFFLYSKLTVDKSRWQQGNVFSCSVMHEALHNHYTQKSLSLSPGK

SEQ ID NO: 445 - protein, 248 aa, Artificial
  Synthetic
CNVNHKPSNTKVDKKVEPKSCDKTHTCPPCPAPELLGGPSVFLFPPKVKDTLMISRTPEVTCVVVDVSHEDPEVKFNWYVDGVEVHNAKTKPREEQYNSTYRVVSVLTVLHQDWLNGKEYKCKVSNKALPAPIEKTISKAKGQPREPQVYTLPPSRDELTKNQVSLTCLVKGFYPSDIAVEWESNGQPENNYKTTPPVLDSDGSFFLYSKLTVDKSRWQQGNVFSCSVMHEALHNHYTQKSLSLSPGK

SEQ ID NO: 446 - protein, 248 aa, Artificial
  Synthetic
CNVNHKPSNTKVDKKVEPKSCDKTHTCPPCPAPELLGGPSVFLFPPKPKDTLMISRTPEVTCVVVDVSHEDPEVKFNWYVDGVEVHNAKTKPREEQYNSTYRVVSVLTVLHQDFLNGKEYKCKVSNKALPAPIEKTISKAKGQPREPQVYTLPPSRDELTKNQVSLTCLVKGFYPSDIAVEWESNGQPENNYKTTPPVLDSDGSFFLYSKLTVDKSRWQQGNVFSCSVMHEALHNHYTQKSLSLSPGK

SEQ ID NO: 447 - protein, 248 aa, Artificial
  Synthetic
CNVNHKPSNTKVDKKVEPKSCDKTHTCPPCPAPELLGGPSVFLFHAKVKDTLMISRTPEVTCVVVDVSHEDPEVKFNWYVDGVEVHNAKTKPREEQYNSTYRVVSVLTVLHQDWLNGKEYKCKVSNKALPAPIEKTISKAKGQPREPQVYTLPPSRDELTKNQVSLTCLVKGFYPSDIAVEWESNGQPENNYKTTPPVLDSDGSFFLYSKLTVDKSRWQQGNVFSCSVMHEALHNHYTQKSLSLSPGK

SEQ ID NO: 448 - protein, 248 aa, Artificial
  Synthetic
CNVNHKPSNTKVDKKVEPKSCDKTHTCPPCPAPELLGGPSVFLFPPKGKDTLMISRTPEVTCVVVDVSHEDPEVKFNWYVDGVEVHNAKTKPREEQYNSTYRVVSVLTVLHQDWLNGKEYKCKVSNKALPAPIEKTISKAKGQPREPQVYTLPPSRDELTKNQVSLTCLVKGFYPSDIAVEWESNGQPENNYKTTPPVLDSDGSFFLYSKLTVDKSRWQQGNVFSCSVMHEALHNHYTQKSLSLSPGK

SEQ ID NO: 449 - protein, 248 aa, Artificial
  Synthetic
CNVNHKPSNTKVDKKVEPKSCDKTHTCPPCPAPELLGGPSVFLFPPKPKDTLMISRTPEVTCVVIDVSHEDPEVKFNWYVDGVEVHNAKTKPREEQYNSTYRVVSVLTVLHQDWLNGKEYKCKVSNKALPAPEEKTISKAKGQPREPQVYTLPPSRDELTKNQVSLTCLVKGFYPSDIAVEWESNGQPENNYKTTPPVLDSDGSFFLYSKLTVDKSRWQQGNVFSCSVMHEALHNHYTQKSLSLSPGK

SEQ ID NO: 450 - protein, 248 aa, Artificial
  Synthetic
CNVNHKPSNTKVDKKVEPKSCDKTHTCPPCPAPELLGGPSVELRPPKPKDTLMISRTPEVTCEVRDVSHEDPEVKFNWYVDGVEVHNAKTKPREEQYNSTYRVVSVLTVLHQDWLNGKEYKCKVSNKALPAPEEKTISKAKGQPREPQVYTLPPSRDELTKNQVSLTCLVKGFYPSDIAVEWESNGQPENNYKTTPPVLDSDGSFFLYSKLTVDKSRWQQGNVFSCSVMHEALHNHYTQKSLSLSPGK

SEQ ID NO: 451 - protein, 248 aa, Artificial
  Synthetic
CNVNHKPSNTKVDKKVEPKSCDKTHTCPPCPAPELLGGPSVELQPPKPKDTLMISRTPEVTCTVEDVSHEDPEVKFNWYVDGVEVHNAKTKPREEQYNSTYRVVSVLTVLHQDWLNGKEYKCKVSNKALPAPEEKTISKAKGQPREPQVYTLPPSRDELTKNQVSLTCLVKGFYPSDIAVEWESNGQPENNYKTTPPVLDSDGSFFLYSKLTVDKSRWQQGNVFSCSVMHEALHNHYTQKSLSLSPGK

SEQ ID NO: 452 - protein, 248 aa, Artificial
  Synthetic
CNVNHKPSNTKVDKKVEPKSCDKTHTCPPCPAPELLGGPSVRLQPPKPKDTLMISRTPEVTCTVRDVSHEDPEVKFNWYVDGVEVHNAKTKPREEQYNSTYRVVSVLTVLHQDWLNGKEYKCKVSNKALPAPEEKTISKAKGQPREPQVYTLPPSRDELTKNQVSLTCLVKGFYPSDIAVEWESNGQPENNYKTTPPVLDSDGSFFLYSKLTVDKSRWQQGNVFSCSVMHEALHNHYTQKSLSLSPGK

SEQ ID NO: 453 - protein, 248 aa, Artificial
  Synthetic
CNVNHKPSNTKVDKKVEPKSCDKTHTCPPCPAPELLGGPSVELYPPKPKDTLMISRTPEVTCTVRDVSHEDPEVKFNWYVDGVEVHNAKTKPREEQYNSTYRVVSVLTVLHQDWLNGKEYKCKVSNKALPAPEEKTISKAKGQPREPQVYTLPPSRDELTKNQVSLTCLVKGFYPSDIAVEWESNGQPENNYKTTPPVLDSDGSFFLYSKLTVDKSRWQQGNVFSCSVMHEALHNHYTQKSLSLSPGK

SEQ ID NO: 454 - protein, 248 aa, Artificial
  Synthetic
CNVNHKPSNTKVDKKVEPKSCDKTHTCPPCPAPELLGGPSVFLFPPKPKDTLMISRTPEVTCVVVDVSHEDPEVKFNWYVDGVEVHNAKTKPREEQYNATYRVVSVLTVLHQDWLNGKEYKCKVSNKALPAPIEKTISKAKGQPREPQVYTLPPSRDELTKNQVSLTCLVKGFYPSDIAVEWESNGQPENNYKTTPPVLDSDGSFFLYSKLTVDKSRWQQGNVFSCSVMHEALHNHYTQKSLSLSPGK

SEQ ID NO: 455 - protein, 248 aa, Artificial
  Synthetic
CNVNHKPSNTKVDKKVEPKSCDKTHTCPPCPAPELLGGPSVFLFPPKPKDTLMISRTPEVTCVVVDVSHEDPEVKFNWYVDGVEVHNAKTKPREEQYNATYRVVSVLTVLHQDWLNGKEYKCKVSNKALPAPEEKTISKAKGQPREPQVYTLPPSRDELTKNQVSLTCLVKGFYPSDIAVEWESNGQPENNYKTTPPVLDSDGSFFLYSKLTVDKSRWQQGNVFSCSVMHEALHNHYTQKSLSLSPGK

SEQ ID NO: 456 - protein, 248 aa, Artificial
  Synthetic
CNVNHKPSNTKVDKKVEPKSCDKTHTCPPCPAPELLGGPSVFLFPPKPKDTLMISRTPEVTCVVVDVSHEDPEVKFNWYVDGVEVHNAKTKPREEQYNATYRVVSVLTVLHQDWLNGKEYKCKVSNKALPAPIAATISKAKGQPREPQVYTLPPSRDELTKNQVSLTCLVKGFYPSDIAVEWESNGQPENNYKTTPPVLDSDGSFFLYSKLTVDKSRWQQGNVFSCSVMHEALHNHYTQKSLSLSPGK

SEQ ID NO: 457 - protein, 248 aa, Artificial
  Synthetic
CNVNHKPSNTKVDKKVEPKSCDKTHTCPPCPAPELLGGPSVFLFPPKPKDTLMISRTPEVTCVVVDVSHEDPEVKFNWYVDGVEVHNAKTKPREEQYNSTYRVVSVLTVLHQDWLNGKEYKCKVSNKALEAPEEKTISKAKGQPREPQVYTLPPSRDELTKNQVSLTCLVKGFYPSDIAVEWESNGQPENNYKTTPPVLDSDGSFFLYSKLTVDKSRWQQGNVFSCSVMHEALHNHYTQKSLSLSPGK

SEQ ID NO: 458 - protein, 248 aa, Artificial
  Synthetic
CNVNHKPSNTKVDKKVEPKSCDKTHTCPPCPAPELLGGPSVFLFPPKPKDTLMISRTPEVTCVVVDVSHEDPEVKFNWYVDGVEVHNAKTKPREEQYNSTYRVVSVLTVLHQDWLNGKEYKCKVSNKALQAPEEKTISKAKGQPREPQVYTLPPSRDELTKNQVSLTCLVKGFYPSDIAVEWESNGQPENNYKTTPPVLDSDGSFFLYSKLTVDKSRWQQGNVFSCSVMHEALHNHYTQKSLSLSPGK

SEQ ID NO: 459 - protein, 248 aa, Artificial
  Synthetic
CNVNHKPSNTKVDKKVEPKSCDKTHTCPPCPAPELLGGPSVFLFPPKPKDTLMISRTPEVTCVVVDVSHEDPEVKFNWYVDGVEVHNAKTKPREEQYNSTYRVVSVLTVLHQDWLNGKEYKCKVSNKALEAPIEKTISKAKGQPREPQVYTLPPSRDELTKNQVSLTCLVKGFYPSDIAVEWESNGQPENNYKTTPPVLDSDGSFFLYSKLTVDKSRWQQGNVFSCSVMHEALHNHYTQKSLSLSPGK

SEQ ID NO: 460 - protein, 248 aa, Artificial
  Synthetic
CNVNHKPSNTKVDKKVEPKSCDKTHTCPPCPAPELLGGPSVFLFPPKPKDTLMISRTPEVTCVVVGVSHEDPEVKFNWYVDGVEVHNAKTKPREEQYNSTYRVVSVLTVLHQDWLNGKEYKCKVSNKALPAPIEKTISKAKGQPREPQVYTLPPSRDELTKNQVSLTCLVKGFYPSDIAVEWESNGQPENNYKTTPPVLDSDGSFFLYSKLTVDKSRWQQGNVFSCSVMHEALHNHYTQKSLSLSPGK

SEQ ID NO: 461 - protein, 248 aa, Artificial
  Synthetic
CNVNHKPSNTKVDKKVEPKSCDKTHTCPPCPAPELLGGPSVFLFPPKPKDTLMISRTPEVTCVVVNVSHEDPEVKFNWYVDGVEVHNAKTKPREEQYNSTYRVVSVLTVLHQDWLNGKEYKCKVSNKALPAPIEKTISKAKGQPREPQVYTLPPSRDELTKNQVSLTCLVKGFYPSDIAVEWESNGQPENNYKTTPPVLDSDGSFFLYSKLTVDKSRWQQGNVFSCSVMHEALHNHYTQKSLSLSPGK

SEQ ID NO: 462 - protein, 248 aa, Artificial
  Synthetic
CNVNHKPSNTKVDKKVEPKSCDKTHTCPPCPAPELLGGPEVFLFPPKPKDTLMISRTPEVTCVVVGVSHEDPEVKFNWYVDGVEVHNAKTKPREEQYNSTYRVVSVLTVLHQDWLNGKEYKCKVSNKALPAPIEKTISKAKGQPREPQVYTLPPSRDELTKNQVSLTCLVKGFYPSDIAVEWESNGQPENNYKTTPPVLDSDGSFFLYSKLTVDKSRWQQGNVFSCSVMHEALHNHYTQKSLSLSPGK

SEQ ID NO: 463 - protein, 248 aa, Artificial
  Synthetic
CNVNHKPSNTKVDKKVEPKSCDKTHTCPPCPAPELLGGPEVFLFPPKPKDTLMISRTPEVTCVVVNVSHEDPEVKFNWYVDGVEVHNAKTKPREEQYNSTYRVVSVLTVLHQDWLNGKEYKCKVSNKALPAPIEKTISKAKGQPREPQVYTLPPSRDELTKNQVSLTCLVKGFYPSDIAVEWESNGQPENNYKTTPPVLDSDGSFFLYSKLTVDKSRWQQGNVFSCSVMHEALHNHYTQKSLSLSPGK

SEQ ID NO: 464 - protein, 248 aa, Artificial
  Synthetic
CNVNHKPSNTKVDKKVEPKSCDKTHTCPPCPAPELLGGPEVFLFPPKPKDTLMISRTPEVTCVVVQVSHEDPEVKFNWYVDGVEVHNAKTKPREEQYNSTYRVVSVLTVLHQDWLNGKEYKCKVSNKALPAPIEKTISKAKGQPREPQVYTLPPSRDELTKNQVSLTCLVKGFYPSDIAVEWESNGQPENNYKTTPPVLDSDGSFFLYSKLTVDKSRWQQGNVFSCSVMHEALHNHYTQKSLSLSPGK

SEQ ID NO: 465 - protein, 248 aa, Artificial
  Synthetic
CNVNHKPSNTKVDKKVEPKSCDKTHTCPPCPAPELLGGPSVFLFPPKPKDTLMISRTPEVTCVVVDVSHEDPEVKFNWYVDGVEVHNAKTKPREEQENSTYRVVSVLTVLHQDWLNGKEYKCKVSNKALPAPIEKTISKAKGQPREPQVYTLPPSRDELTKNQVSLTCLVKGFYPSDIAVEWESNGQPENNYKTTPPVLDSDGSFFLYSKLTVDKSRWQQGNVFSCSVMHEALHNHYTQKSLSLSPGK

SEQ ID NO: 466 - protein, 248 aa, Artificial
  Synthetic
CNVNHKPSNTKVDKKVEPKSCDKTHTCPPCPAPELLGGPSVFLFPPKPKDTLMISRTPEVTCVVVDVSHEDPEVKFNWYVDGVEVHNAKTKPREEQQNSTYRVVSVLTVLHQDWLNGKEYKCKVSNKALPAPIEKTISKAKGQPREPQVYTLPPSRDELTKNQVSLTCLVKGFYPSDIAVEWESNGQPENNYKTTPPVLDSDGSFFLYSKLTVDKSRWQQGNVFSCSVMHEALHNHYTQKSLSLSPGK

SEQ ID NO: 467 - protein, 248 aa, Artificial
  Synthetic
CNVNHKPSNTKVDKKVEPKSCDKTHTCPPCPAPELLGGPSVFLFPPKPKDTLMISRTPEVTCVVVDVSHEDPEVKFNWYVDGVEVHNAKTKPREEQYNTTYRVVSVLTVLHQDWLNGKEYKCKVSNKALPAPIEKTISKAKGQPREPQVYTLPPSRDELTKNQVSLTCLVKGFYPSDIAVEWESNGQPENNYKTTPPVLDSDGSFFLYSKLTVDKSRWQQGNVFSCSVMHEALHNHYTQKSLSLSPGK

SEQ ID NO: 468 - protein, 248 aa, Artificial
  Synthetic
CNVNHKPSNTKVDKKVEPKSCDKTHTCPPCPAPELLGGPSVFLFPPKPKDTLMISRTPEVTCVVVDVSHEDPEVKFNWYVDGVEVHNAKTKPREEQYNNTYRVVSVLTVLHQDWLNGKEYKCKVSNKALPAPIEKTISKAKGQPREPQVYTLPPSRDELTKNQVSLTCLVKGFYPSDIAVEWESNGQPENNYKTTPPVLDSDGSFFLYSKLTVDKSRWQQGNVFSCSVMHEALHNHYTQKSLSLSPGK

SEQ ID NO: 469 - protein, 248 aa, Artificial
  Synthetic
CNVNHKPSNTKVDKKVEPKSCDKTHTCPPCPAPELLGGPSVFLFPPKPKDTLMISRTPEVTCVVVDVSHEDPEVKFNWYVDGVEVHNAKTKPREEQYNSIYRVVSVLTVLHQDWLNGKEYKCKVSNKALPAPIEKTISKAKGQPREPQVYTLPPSRDELTKNQVSLTCLVKGFYPSDIAVEWESNGQPENNYKTTPPVLDSDGSFFLYSKLTVDKSRWQQGNVFSCSVMHEALHNHYTQKSLSLSPGK

SEQ ID NO: 470 - protein, 248 aa, Artificial
  Synthetic
CNVNHKPSNTKVDKKVEPKSCDKTHTCPPCPAPELLGGPSVFLFPPKPKDTLMISRTPEVTCVVVDVSHEDPEVKFNWYVDGVEVHNAKTKPREEQYNSTYRVVSVLTVLHQDWLNGKEYKCKVSNKSLPAPIEKTISKAKGQPREPQVYTLPPSRDELTKNQVSLTCLVKGFYPSDIAVEWESNGQPENNYKTTPPVLDSDGSFFLYSKLTVDKSRWQQGNVFSCSVMHEALHNHYTQKSLSLSPGK

SEQ ID NO: 471 - protein, 248 aa, Artificial
  Synthetic
CNVNHKPSNTKVDKKVEPKSCDKTHTCPPCPAPELLGGPSVFLFPPKPKDTLMISRTPEVTCVVVDVSHEDPEVKFNWYVDGVEVHNAKTKPREEQYNSTYRVVSVLTVLHQDWLNGKEYKCKVSNKNLPAPIEKTISKAKGQPREPQVYTLPPSRDELTKNQVSLTCLVKGFYPSDIAVEWESNGQPENNYKTTPPVLDSDGSFFLYSKLTVDKSRWQQGNVFSCSVMHEALHNHYTQKSLSLSPGK

SEQ ID NO: 472 - protein, 248 aa, Artificial
  Synthetic
CNVNHKPSNTKVDKKVEPKSCDKTHTCPPCPAPELLGGPSVFLFPPKPKDTLMISRTPEVTCVVVDVQHEDPEVKFNWYVDGVEVHNAKTKPREEQYNSTYRVVSVLTVLHQDWLNGKEYKCKVSNKSLPAPIEKTISKAKGQPREPQVYTLPPSRDELTKNQVSLTCLVKGFYPSDIAVEWESNGQPENNYKTTPPVLDSDGSFFLYSKLTVDKSRWQQGNVFSCSVMHEALHNHYTQKSLSLSPGK

SEQ ID NO: 473 - protein, 248 aa, Artificial
  Synthetic
CNVNHKPSNTKVDKKVEPKSCDKTHTCPPCPAPELLGGPSVFLFPPKPKDTLMISRTPEVTCVVVDVLHEDPEVKFNWYVDGVEVHNAKTKPREEQYNSTYRVVSVLTVLHQDWLNGKEYKCKVSNKSLPAPIEKTISKAKGQPREPQVYTLPPSRDELTKNQVSLTCLVKGFYPSDIAVEWESNGQPENNYKTTPPVLDSDGSFFLYSKLTVDKSRWQQGNVFSCSVMHEALHNHYTQKSLSLSPGK

SEQ ID NO: 474 - protein, 248 aa, Artificial
  Synthetic
CNVNHKPSNTKVDKKVEPKSCDKTHTCPPCPAPELLGGPSVFLFPPKPKDTLMISRTPEVTCVVVDVSHEDPEVKFNWYVDGVEVHNAKTKPREEQYNSTYRVVSVLTVLHQDWLNGKEYKCKVSNKLLPAPIEKTISKAKGQPREPQVYTLPPSRDELTKNQVSLTCLVKGFYPSDIAVEWESNGQPENNYKTTPPVLDSDGSFFLYSKLTVDKSRWQQGNVFSCSVMHEALHNHYTQKSLSLSPGK

SEQ ID NO: 475 - protein, 248 aa, Artificial
  Synthetic
CNVNHKPSNTKVDKKVEPKSCDKTHTCPPCPAPELLGGPSVFLFPPKPKDTLMISRTPEVTCVVVDVSHEDPEVKFNWYVDGVEVHNAKTKPREEQYNSTYRVVSVLTVLHQDWLNGKEYKCKVSNKALFAPIEKTISKAKGQPREPQVYTLPPSRDELTKNQVSLTCLVKGFYPSDIAVEWESNGQPENNYKTTPPVLDSDGSFFLYSKLTVDKSRWQQGNVFSCSVMHEALHNHYTQKSLSLSPGK

SEQ ID NO: 476 - protein, 248 aa, Artificial
  Synthetic
CNVNHKPSNTKVDKKVEPKSCDKTHTCPPCPAPELLGGPSVFLFPPKPKDTLMISRTPEVTCVVVDVSHEDPEVKFNWYVDGVEVHNAKTKPREEQYNSTYRVVSVLTVLHQDWLNGKEYKCKVSNKALPLPIEKTISKAKGQPREPQVYTLPPSRDELTKNQVSLTCLVKGFYPSDIAVEWESNGQPENNYKTTPPVLDSDGSFFLYSKLTVDKSRWQQGNVFSCSVMHEALHNHYTQKSLSLSPGK

SEQ ID NO: 477 - protein, 248 aa, Artificial
  Synthetic
CNVNHKPSNTKVDKKVEPKSCDKTHTCPPCPAPELLGGPSVFLFPPKPKDTLMISRTPEVTCVVVDVSHEDPEVKFNWYVDGVEVHNAKTKPREEQYNSTYRVVSVLTVLHQDWLNGKEYKCKVSNKALPYPIEKTISKAKGQPREPQVYTLPPSRDELTKNQVSLTCLVKGFYPSDIAVEWESNGQPENNYKTTPPVLDSDGSFFLYSKLTVDKSRWQQGNVFSCSVMHEALHNHYTQKSLSLSPGK

SEQ ID NO: 478 - protein, 248 aa, Artificial
  Synthetic
CNVNHKPSNTKVDKKVEPKSCDKTHTCPPCPAPELLGGPSVFLFPPKPKDTLMISRTPEVTCVVVDVSHEDPEVKFNWYVDGVEVHNAKTKPREEQYNSTYRVVSVLTVLHQDWLNGKEYKCKVSNKALPAPDEKTISKAKGQPREPQVYTLPPSRDELTKNQVSLTCLVKGFYPSDIAVEWESNGQPENNYKTTPPVLDSDGSFFLYSKLTVDKSRWQQGNVFSCSVMHEALHNHYTQKSLSLSPGK

SEQ ID NO: 479 - protein, 248 aa, Artificial
  Synthetic
CNVNHKPSNTKVDKKVEPKSCDKTHTCPPCPAPELLGGPSVFLFPPKPKDTLMISRTPEVTCVVVDVSHEDPEVKFNWYVDGVEVHNAKTKPREEQYSSTYRVVSVLTVLHQDWLNGKEYKCKVSNKALPAPIEKTISKAKGQPREPQVYTLPPSRDELTKNQVSLTCLVKGFYPSDIAVEWESNGQPENNYKTTPPVLDSDGSFFLYSKLTVDKSRWQQGNVFSCSVMHEALHNHYTQKSLSLSPGK

SEQ ID NO: 480 - protein, 248 aa, Artificial
  Synthetic
CNVNHKPSNTKVDKKVEPKSCDKTHTCPPCPAPELLGGPSVFLFPPKPKDTLMISRTPEVTCVVVDVSHEDPEVKFNWYVDGVEVHNAKTKPREEQYDSTYRVVSVLTVLHQDWLNGKEYKCKVSNKALPAPIEKTISKAKGQPREPQVYTLPPSRDELTKNQVSLTCLVKGFYPSDIAVEWESNGQPENNYKTTPPVLDSDGSFFLYSKLTVDKSRWQQGNVFSCSVMHEALHNHYTQKSLSLSPGK

SEQ ID NO: 481 - protein, 248 aa, Artificial
  Synthetic
CNVNHKPSNTKVDKKVEPKSCDKTHTCPPCPAPELLGGPSVFLFPPKPKDTLMISRTPEVTCVVVDVSHEDPEVKFNWYVDGVEVHNAKTKPREEQYSSTYRVVSVLTVLHQDWLNGKEYKCKVSNKALPAPEEKTISKAKGQPREPQVYTLPPSRDELTKNQVSLTCLVKGFYPSDIAVEWESNGQPENNYKTTPPVLDSDGSFFLYSKLTVDKSRWQQGNVFSCSVMHEALHNHYTQKSLSLSPGK

SEQ ID NO: 482 - protein, 248 aa, Artificial
  Synthetic
CNVNHKPSNTKVDKKVEPKSCDKTHTCPPCPAPELLGGPSVFLFPPKPKDTLMISRTPEVTCVVVDVSHEDPEVKFNWYVDGVEVHNAKTKPREEQYDSTYRVVSVLTVLHQDWLNGKEYKCKVSNKALPAPEEKTISKAKGQPREPQVYTLPPSRDELTKNQVSLTCLVKGFYPSDIAVEWESNGQPENNYKTTPPVLDSDGSFFLYSKLTVDKSRWQQGNVFSCSVMHEALHNHYTQKSLSLSPGK

SEQ ID NO: 483 - protein, 248 aa, Artificial
  Synthetic
CNVNHKPSNTKVDKKVEPKSCDKTHTCPPCPAPELLGGPSVFLFPPKPKDTLMISRTPEVTCVVVDVSHEDPEVKFNWYVDGVEVHNAKTKPREEQYESTYRVVSVLTVLHQDWLNGKEYKCKVSNKALPAPEEKTISKAKGQPREPQVYTLPPSRDELTKNQVSLTCLVKGFYPSDIAVEWESNGQPENNYKTTPPVLDSDGSFFLYSKLTVDKSRWQQGNVFSCSVMHEALHNHYTQKSLSLSPGK

SEQ ID NO: 484 - protein, 248 aa, Artificial
  Synthetic
CNVNHKPSNTKVDKKVEPKSCDKTHTCPPCPAPELLGGPSVFLFPPKPKDTLMISRTPEVTCVVVYVSHEDPEVKFNWYVDGVEVHNAKTKPREEQYDSTYRVVSVLTVLHQDWLNGKEYKCKVSNKALPAPEEKTISKAKGQPREPQVYTLPPSRDELTKNQVSLTCLVKGFYPSDIAVEWESNGQPENNYKTTPPVLDSDGSFFLYSKLTVDKSRWQQGNVFSCSVMHEALHNHYTQKSLSLSPGK

SEQ ID NO: 485 - protein, 248 aa, Artificial
  Synthetic
CNVNHKPSNTKVDKKVEPKSCDKTHTCPPCPAPELLGGPSVFLFPPKPKDTLMISRTPEVTCVVVYVSHEDPEVKFNWYVDGVEVHNAKTKPREEQYDSLYRVVSVLTVLHQDWLNGKEYKCKVSNKALPAPEEKTISKAKGQPREPQVYTLPPSRDELTKNQVSLTCLVKGFYPSDIAVEWESNGQPENNYKTTPPVLDSDGSFFLYSKLTVDKSRWQQGNVFSCSVMHEALHNHYTQKSLSLSPGK

SEQ ID NO: 486 - protein, 248 aa, Artificial
  Synthetic
CNVNHKPSNTKVDKKVEPKSCDKTHTCPPCPAPELLGGPSVFLFPPKPKDTLMISRTPEVTCVVVFVSHEDPEVKFNWYVDGVEVHNAKTKPREEQYESTYRVVSVLTVLHQDWLNGKEYKCKVSNKALPAPEEKTISKAKGQPREPQVYTLPPSRDELTKNQVSLTCLVKGFYPSDIAVEWESNGQPENNYKTTPPVLDSDGSFFLYSKLTVDKSRWQQGNVFSCSVMHEALHNHYTQKSLSLSPGK

SEQ ID NO: 487 - protein, 248 aa, Artificial
  Synthetic
CNVNHKPSNTKVDKKVEPKSCDKTHTCPPCPAPELLGGPSVFLFPPKPKDTLMISRTPEVTCVVVDVSHEDPEVKFNWYVDGVEVHNAKTKPREEQYNSTYRVVSVLTVLHQDWLNGKEYKCKVSNKAIPAPEEKTISKAKGQPREPQVYTLPPSRDELTKNQVSLTCLVKGFYPSDIAVEWESNGQPENNYKTTPPVLDSDGSFFLYSKLTVDKSRWQQGNVFSCSVMHEALHNHYTQKSLSLSPGK

SEQ ID NO: 488 - protein, 248 aa, Artificial
  Synthetic
CNVNHKPSNTKVDKKVEPKSCDKTHTCPPCPAPELLGGPSVFLFPPKPKDTLMISRTPEVTCVVVDVSHEDPEVKFNWYVDGVEVHNAKTKPREEQYNSTYRVVSVLTVLHQDWLNGKEYKCKVSNKAQPAPEEKTISKAKGQPREPQVYTLPPSRDELTKNQVSLTCLVKGFYPSDIAVEWESNGQPENNYKTTPPVLDSDGSFFLYSKLTVDKSRWQQGNVFSCSVMHEALHNHYTQKSLSLSPGK

SEQ ID NO: 489 - protein, 248 aa, Artificial
  Synthetic
CNVNHKPSNTKVDKKVEPKSCDKTHTCPPCPAPELLGGPSVFLFPPKPKDTLMISRTPEVTCVVVDVSHEDPEVKFNWYVDGVEVHNAKTKPREEQYNSTYRVVSVLTVLHQDWLNGKEYKCKVSNKALPAPNEKTISKAKGQPREPQVYTLPPSRDELTKNQVSLTCLVKGFYPSDIAVEWESNGQPENNYKTTPPVLDSDGSFFLYSKLTVDKSRWQQGNVFSCSVMHEALHNHYTQKSLSLSPGK

SEQ ID NO: 490 - protein, 248 aa, Artificial
  Synthetic
CNVNHKPSNTKVDKKVEPKSCDKTHTCPPCPAPELLGGPSVFLFPPKPKDTLMISRTPEVTCVVVDVSHEDPEVKFNWYVDGVEVHNAKTKPREEQYNSTYRVVSVLTVLHQDWLNGKEYKCKVSNKALPAPQEKTISKAKGQPREPQVYTLPPSRDELTKNQVSLTCLVKGFYPSDIAVEWESNGQPENNYKTTPPVLDSDGSFFLYSKLTVDKSRWQQGNVFSCSVMHEALHNHYTQKSLSLSPGK

SEQ ID NO: 491 - protein, 248 aa, Artificial
  Synthetic
CNVNHKPSNTKVDKKVEPKSCDKTHTCPPCPAPELLGGPSVFLFPPKPKDTLMISRTPEVTCVVTDVSHEDPEVKFNWYVDGVEVHNAKTKPREEQYNSTYRVVSVLTVLHQDWLNGKEYKCKVSNKALPAPIEKTISKAKGQPREPQVYTLPPSRDELTKNQVSLTCLVKGFYPSDIAVEWESNGQPENNYKTTPPVLDSDGSFFLYSKLTVDKSRWQQGNVFSCSVMHEALHNHYTQKSLSLSPGK

SEQ ID NO: 492 - protein, 248 aa, Artificial
  Synthetic
CNVNHKPSNTKVDKKVEPKSCDKTHTCPPCPAPELLGGPSVFLFPPKPKDTLMISRTPEVTCVVFDVSHEDPEVKFNWYVDGVEVHNAKTKPREEQYNSTYRVVSVLTVLHQDWLNGKEYKCKVSNKALPAPIEKTISKAKGQPREPQVYTLPPSRDELTKNQVSLTCLVKGFYPSDIAVEWESNGQPENNYKTTPPVLDSDGSFFLYSKLTVDKSRWQQGNVFSCSVMHEALHNHYTQKSLSLSPGK

SEQ ID NO: 493 - protein, 248 aa, Artificial
  Synthetic
CNVNHKPSNTKVDKKVEPKSCDKTHTCPPCPAPELLGGPSIFLFPPKPKDTLMISRTPEVTCVVVDVSHEDPEVKFNWYVDGVEVHNAKTKPREEQYNSTYRVVSVLTVLHQDWLNGKEYKCKVSNKALPAPIEKTISKAKGQPREPQVYTLPPSRDELTKNQVSLTCLVKGFYPSDIAVEWESNGQPENNYKTTPPVLDSDGSFFLYSKLTVDKSRWQQGNVFSCSVMHEALHNHYTQKSLSLSPGK

SEQ ID NO: 494 - protein, 248 aa, Artificial
  Synthetic
CNVNHKPSNTKVDKKVEPKSCDKTHTCPPCPAPELLGGPSVFLFPPKPKDTLMISRTPEVTCVIVDVSHEDPEVKFNWYVDGVEVHNAKTKPREEQYNSTYRVVSVLTVLHQDWLNGKEYKCKVSNKALPAPIEKTISKAKGQPREPQVYTLPPSRDELTKNQVSLTCLVKGFYPSDIAVEWESNGQPENNYKTTPPVLDSDGSFFLYSKLTVDKSRWQQGNVFSCSVMHEALHNHYTQKSLSLSPGK

SEQ ID NO: 495 - protein, 248 aa, Artificial
  Synthetic
CNVNHKPSNTKVDKKVEPKSCDKTHTCPPCPAPELLGGPSVFLFPPKPKDTLMISRTPEVTCVVVDISHEDPEVKFNWYVDGVEVHNAKTKPREEQYNSTYRVVSVLTVLHQDWLNGKEYKCKVSNKALPAPIEKTISKAKGQPREPQVYTLPPSRDELTKNQVSLTCLVKGFYPSDIAVEWESNGQPENNYKTTPPVLDSDGSFFLYSKLTVDKSRWQQGNVFSCSVMHEALHNHYTQKSLSLSPGK

SEQ ID NO: 496 - protein, 248 aa, Artificial
  Synthetic
CNVNHKPSNTKVDKKVEPKSCDKTHTCPPCPAPELLGGPSVFLFPPKPKDTLMISRTPEVTCVVVDVSHEDPEVKFNWYVDGVEVHNAKTKPREEQYNSAYRVVSVLTVLHQDWLNGKEYKCKVSNKALPAPIEKTISKAKGQPREPQVYTLPPSRDELTKNQVSLTCLVKGFYPSDIAVEWESNGQPENNYKTTPPVLDSDGSFFLYSKLTVDKSRWQQGNVFSCSVMHEALHNHYTQKSLSLSPGK

SEQ ID NO: 497 - protein, 248 aa, Artificial
  Synthetic
CNVNHKPSNTKVDKKVEPKSCDKTHTCPPCPAPELLGGPSVFLFPPKPKDTLMISRTPEVTCVVVDVSHEDPEVKFNWYVDGVEVHNAKTKPREEQYNSSYRVVSVLTVLHQDWLNGKEYKCKVSNKALPAPIEKTISKAKGQPREPQVYTLPPSRDELTKNQVSLTCLVKGFYPSDIAVEWESNGQPENNYKTTPPVLDSDGSFFLYSKLTVDKSRWQQGNVFSCSVMHEALHNHYTQKSLSLSPGK

SEQ ID NO: 498 - protein, 248 aa, Artificial
  Synthetic
CNVNHKPSNTKVDKKVEPKSCDKTHTCPPCPAPELLGGPSVFLFPPKPKDTLMISRTPEVTCVVVDVSHEDPEVKFNWYVDGVEVHNAKTKPREEQYNSVYRVVSVLTVLHQDWLNGKEYKCKVSNKALPAPIEKTISKAKGQPREPQVYTLPPSRDELTKNQVSLTCLVKGFYPSDIAVEWESNGQPENNYKTTPPVLDSDGSFFLYSKLTVDKSRWQQGNVFSCSVMHEALHNHYTQKSLSLSPGK

SEQ ID NO: 499 - protein, 248 aa, Artificial
  Synthetic
CNVNHKPSNTKVDKKVEPKSCDKTHTCPPCPAPELLGGPSVFLFPPKPKDTLMISRTPEVTCVVVDVSHEDPEVKFNWYVDGVEVHNAKTKPREEQYNSTYRVVSVLTVLHQDWLNGKEYKCKVSQKALPAPIEKTISKAKGQPREPQVYTLPPSRDELTKNQVSLTCLVKGFYPSDIAVEWESNGQPENNYKTTPPVLDSDGSFFLYSKLTVDKSRWQQGNVFSCSVMHEALHNHYTQKSLSLSPGK

SEQ ID NO: 500 - protein, 248 aa, Artificial
  Synthetic
CNVNHKPSNTKVDKKVEPKSCDKTHTCPPCPAPELLGGPSVFLFPPKPKDTLMISRTPEVTCVVVDVSHEDPEVKFNWYVDGVEVHNAKTKPREEQYNSTYRVVSVLTVLHQDWLNGKEYKCKVSLKALPAPIEKTISKAKGQPREPQVYTLPPSRDELTKNQVSLTCLVKGFYPSDIAVEWESNGQPENNYKTTPPVLDSDGSFFLYSKLTVDKSRWQQGNVFSCSVMHEALHNHYTQKSLSLSPGK

SEQ ID NO: 501 - protein, 248 aa, Artificial
  Synthetic
CNVNHKPSNTKVDKKVEPKSCDKTHTCPPCPAPELLGGPSVFLFPPKPKDTLMISRTPEVTCVVVDVSHEDPEVKFNWYVDGVEVHNAKTKPREEQYNSTYRVVSVLTVLHQDWLNGKEYKCKVSIKALPAPIEKTISKAKGQPREPQVYTLPPSRDELTKNQVSLTCLVKGFYPSDIAVEWESNGQPENNYKTTPPVLDSDGSFFLYSKLTVDKSRWQQGNVFSCSVMHEALHNHYTQKSLSLSPGK

SEQ ID NO: 502 - protein, 248 aa, Artificial
  Synthetic
CNVNHKPSNTKVDKKVEPKSCDKTHTCPPCPAPELLGGPDVFLFPPKPKDTLMISRTPEVTCVVVDVSHEDPEVKFNWYVDGVEVHNAKTKPREEQYNSTYRVVSVLTVLHQDWLNGKEYKCKVSNKALPAPIEKTISKAKGQPREPQVYTLPPSRDELTKNQVSLTCLVKGFYPSDIAVEWESNGQPENNYKTTPPVLDSDGSFFLYSKLTVDKSRWQQGNVFSCSVMHEALHNHYTQKSLSLSPGK

SEQ ID NO: 503 - protein, 248 aa, Artificial
  Synthetic
CNVNHKPSNTKVDKKVEPKSCDKTHTCPPCPAPELLGGPNVFLFPPKPKDTLMISRTPEVTCVVVDVSHEDPEVKFNWYVDGVEVHNAKTKPREEQYNSTYRVVSVLTVLHQDWLNGKEYKCKVSNKALPAPIEKTISKAKGQPREPQVYTLPPSRDELTKNQVSLTCLVKGFYPSDIAVEWESNGQPENNYKTTPPVLDSDGSFFLYSKLTVDKSRWQQGNVFSCSVMHEALHNHYTQKSLSLSPGK

SEQ ID NO: 504 - protein, 248 aa, Artificial
  Synthetic
CNVNHKPSNTKVDKKVEPKSCDKTHTCPPCPAPELLGGPFVFLFPPKPKDTLMISRTPEVTCVVVDVSHEDPEVKFNWYVDGVEVHNAKTKPREEQYNSTYRVVSVLTVLHQDWLNGKEYKCKVSNKALPAPIEKTISKAKGQPREPQVYTLPPSRDELTKNQVSLTCLVKGFYPSDIAVEWESNGQPENNYKTTPPVLDSDGSFFLYSKLTVDKSRWQQGNVFSCSVMHEALHNHYTQKSLSLSPGK

SEQ ID NO: 505 - protein, 248 aa, Artificial
  Synthetic
CNVNHKPSNTKVDKKVEPKSCDKTHTCPPCPAPELLGGPDVFLFPPKPKDTLMISRTPEVTCVVVDVSHEDPEVKFNWYVDGVEVHNAKTKPREEQYNSTYRVVSVLTVLHQDWLNGKEYKCKVSNKALPAPDEKTISKAKGQPREPQVYTLPPSRDELTKNQVSLTCLVKGFYPSDIAVEWESNGQPENNYKTTPPVLDSDGSFFLYSKLTVDKSRWQQGNVFSCSVMHEALHNHYTQKSLSLSPGK

SEQ ID NO: 506 - protein, 248 aa, Artificial
  Synthetic
CNVNHKPSNTKVDKKVEPKSCDKTHTCPPCPAPELLGGPDVFLFPPKPKDTLMISRTPEVTCVVVDVSHEDPEVKFNWYVDGVEVHNAKTKPREEQYNSTYRVVSVLTVLHQDWLNGKEYKCKVSNKALPAPEEKTISKAKGQPREPQVYTLPPSRDELTKNQVSLTCLVKGFYPSDIAVEWESNGQPENNYKTTPPVLDSDGSFFLYSKLTVDKSRWQQGNVFSCSVMHEALHNHYTQKSLSLSPGK

SEQ ID NO: 507 - protein, 248 aa, Artificial
  Synthetic
CNVNHKPSNTKVDKKVEPKSCDKTHTCPPCPAPELLGGPDVFLFPPKPKDTLMISRTPEVTCVVVDVSHEDPEVKFNWYVDGVEVHNAKTKPREEQYNSTYRVVSVLTVLHQDWLNGKEYKCKVSNKALPAPNEKTISKAKGQPREPQVYTLPPSRDELTKNQVSLTCLVKGFYPSDIAVEWESNGQPENNYKTTPPVLDSDGSFFLYSKLTVDKSRWQQGNVFSCSVMHEALHNHYTQKSLSLSPGK

SEQ ID NO: 508 - protein, 248 aa, Artificial
  Synthetic
CNVNHKPSNTKVDKKVEPKSCDKTHTCPPCPAPELLGGPDVFLFPPKPKDTLMISRTPEVTCVVVDVSHEDPEVKFNWYVDGVEVHNAKTKPREEQYNSTYRVVSVLTVLHQDWLNGKEYKCKVSNKALPAPQEKTISKAKGQPREPQVYTLPPSRDELTKNQVSLTCLVKGFYPSDIAVEWESNGQPENNYKTTPPVLDSDGSFFLYSKLTVDKSRWQQGNVFSCSVMHEALHNHYTQKSLSLSPGK

SEQ ID NO: 509 - protein, 248 aa, Artificial
  Synthetic
CNVNHKPSNTKVDKKVEPKSCDKTHTCPPCPAPELLGGPEVFLFPPKPKDTLMISRTPEVTCVVVDVSHEDPEVKFNWYVDGVEVHNAKTKPREEQYNSTYRVVSVLTVLHQDWLNGKEYKCKVSNKALPAPDEKTISKAKGQPREPQVYTLPPSRDELTKNQVSLTCLVKGFYPSDIAVEWESNGQPENNYKTTPPVLDSDGSFFLYSKLTVDKSRWQQGNVFSCSVMHEALHNHYTQKSLSLSPGK

SEQ ID NO: 510 - protein, 248 aa, Artificial
  Synthetic
CNVNHKPSNTKVDKKVEPKSCDKTHTCPPCPAPELLGGPEVFLFPPKPKDTLMISRTPEVTCVVVDVSHEDPEVKFNWYVDGVEVHNAKTKPREEQYNSTYRVVSVLTVLHQDWLNGKEYKCKVSNKALPAPNEKTISKAKGQPREPQVYTLPPSRDELTKNQVSLTCLVKGFYPSDIAVEWESNGQPENNYKTTPPVLDSDGSFFLYSKLTVDKSRWQQGNVFSCSVMHEALHNHYTQKSLSLSPGK

SEQ ID NO: 511 - protein, 248 aa, Artificial
  Synthetic
CNVNHKPSNTKVDKKVEPKSCDKTHTCPPCPAPELLGGPEVFLFPPKPKDTLMISRTPEVTCVVVDVSHEDPEVKFNWYVDGVEVHNAKTKPREEQYNSTYRVVSVLTVLHQDWLNGKEYKCKVSNKALPAPQEKTISKAKGQPREPQVYTLPPSRDELTKNQVSLTCLVKGFYPSDIAVEWESNGQPENNYKTTPPVLDSDGSFFLYSKLTVDKSRWQQGNVFSCSVMHEALHNHYTQKSLSLSPGK

SEQ ID NO: 512 - protein, 248 aa, Artificial
  Synthetic
CNVNHKPSNTKVDKKVEPKSCDKTHTCPPCPAPELLGGPNVFLFPPKPKDTLMISRTPEVTCVVVDVSHEDPEVKFNWYVDGVEVHNAKTKPREEQYNSTYRVVSVLTVLHQDWLNGKEYKCKVSNKALPAPDEKTISKAKGQPREPQVYTLPPSRDELTKNQVSLTCLVKGFYPSDIAVEWESNGQPENNYKTTPPVLDSDGSFFLYSKLTVDKSRWQQGNVFSCSVMHEALHNHYTQKSLSLSPGK

SEQ ID NO: 513 - protein, 248 aa, Artificial
  Synthetic
CNVNHKPSNTKVDKKVEPKSCDKTHTCPPCPAPELLGGPNVFLFPPKPKDTLMISRTPEVTCVVVDVSHEDPEVKFNWYVDGVEVHNAKTKPREEQYNSTYRVVSVLTVLHQDWLNGKEYKCKVSNKALPAPEEKTISKAKGQPREPQVYTLPPSRDELTKNQVSLTCLVKGFYPSDIAVEWESNGQPENNYKTTPPVLDSDGSFFLYSKLTVDKSRWQQGNVFSCSVMHEALHNHYTQKSLSLSPGK

SEQ ID NO: 514 - protein, 248 aa, Artificial
  Synthetic
CNVNHKPSNTKVDKKVEPKSCDKTHTCPPCPAPELLGGPNVFLFPPKPKDTLMISRTPEVTCVVVDVSHEDPEVKFNWYVDGVEVHNAKTKPREEQYNSTYRVVSVLTVLHQDWLNGKEYKCKVSNKALPAPNEKTISKAKGQPREPQVYTLPPSRDELTKNQVSLTCLVKGFYPSDIAVEWESNGQPENNYKTTPPVLDSDGSFFLYSKLTVDKSRWQQGNVFSCSVMHEALHNHYTQKSLSLSPGK

SEQ ID NO: 515 - protein, 248 aa, Artificial
  Synthetic
CNVNHKPSNTKVDKKVEPKSCDKTHTCPPCPAPELLGGPNVFLFPPKPKDTLMISRTPEVTCVVVDVSHEDPEVKFNWYVDGVEVHNAKTKPREEQYNSTYRVVSVLTVLHQDWLNGKEYKCKVSNKALPAPQEKTISKAKGQPREPQVYTLPPSRDELTKNQVSLTCLVKGFYPSDIAVEWESNGQPENNYKTTPPVLDSDGSFFLYSKLTVDKSRWQQGNVFSCSVMHEALHNHYTQKSLSLSPGK

SEQ ID NO: 516 - protein, 248 aa, Artificial
  Synthetic
CNVNHKPSNTKVDKKVEPKSCDKTHTCPPCPAPELLGGPQVFLFPPKPKDTLMISRTPEVTCVVVDVSHEDPEVKFNWYVDGVEVHNAKTKPREEQYNSTYRVVSVLTVLHQDWLNGKEYKCKVSNKALPAPDEKTISKAKGQPREPQVYTLPPSRDELTKNQVSLTCLVKGFYPSDIAVEWESNGQPENNYKTTPPVLDSDGSFFLYSKLTVDKSRWQQGNVFSCSVMHEALHNHYTQKSLSLSPGK

SEQ ID NO: 517 - protein, 248 aa, Artificial
  Synthetic
CNVNHKPSNTKVDKKVEPKSCDKTHTCPPCPAPELLGGPQVFLFPPKPKDTLMISRTPEVTCVVVDVSHEDPEVKFNWYVDGVEVHNAKTKPREEQYNSTYRVVSVLTVLHQDWLNGKEYKCKVSNKALPAPNEKTISKAKGQPREPQVYTLPPSRDELTKNQVSLTCLVKGFYPSDIAVEWESNGQPENNYKTTPPVLDSDGSFFLYSKLTVDKSRWQQGNVFSCSVMHEALHNHYTQKSLSLSPGK

SEQ ID NO: 518 - protein, 248 aa, Artificial
  Synthetic
CNVNHKPSNTKVDKKVEPKSCDKTHTCPPCPAPELLGGPQVFLFPPKPKDTLMISRTPEVTCVVVDVSHEDPEVKFNWYVDGVEVHNAKTKPREEQYNSTYRVVSVLTVLHQDWLNGKEYKCKVSNKALPAPQEKTISKAKGQPREPQVYTLPPSRDELTKNQVSLTCLVKGFYPSDIAVEWESNGQPENNYKTTPPVLDSDGSFFLYSKLTVDKSRWQQGNVFSCSVMHEALHNHYTQKSLSLSPGK

SEQ ID NO: 519 - protein, 248 aa, Artificial
  Synthetic
CNVNHKPSNTKVDKKVEPKSCDKTHTCPPCPAPELLGGPSVFLFPPKPKDTLMISRTPEVTCVVVDVSHEDPEVKFNWYVDGVEVHNAKTKPREEQYNSTYRVVSVLTVLHQDWLNGKEYKCKVSNEALPAPIEKTISKAKGQPREPQVYTLPPSRDELTKNQVSLTCLVKGFYPSDIAVEWESNGQPENNYKTTPPVLDSDGSFFLYSKLTVDKSRWQQGNVFSCSVMHEALHNHYTQKSLSLSPGK

SEQ ID NO: 520 - protein, 248 aa, Artificial
  Synthetic
CNVNHKPSNTKVDKKVEPKSCDKTHTCPPCPAPELLGGPSVFLFPPKPKDTLMISRTPEVTCVVVDVSHEDPEVKFNWYVDGVEVHNAKTKPREEQDNSTYRVVSVLTVLHQDWLNGKEYKCKVSNKALPAPIEKTISKAKGQPREPQVYTLPPSRDELTKNQVSLTCLVKGFYPSDIAVEWESNGQPENNYKTTPPVLDSDGSFFLYSKLTVDKSRWQQGNVFSCSVMHEALHNHYTQKSLSLSPGK

SEQ ID NO: 521 - protein, 248 aa, Artificial
  Synthetic
CNVNHKPSNTKVDKKVEPKSCDKTHTCPPCPAPELLGGPSVFLFPPKPKDTLMISRTPEVTCVVVDVSHEDPEVKFNWYVDGVEVHNAKTKPREEQNNSTYRVVSVLTVLHQDWLNGKEYKCKVSNKALPAPIEKTISKAKGQPREPQVYTLPPSRDELTKNQVSLTCLVKGFYPSDIAVEWESNGQPENNYKTTPPVLDSDGSFFLYSKLTVDKSRWQQGNVFSCSVMHEALHNHYTQKSLSLSPGK

SEQ ID NO: 522 - protein, 248 aa, Artificial
  Synthetic
CNVNHKPSNTKVDKKVEPKSCDKTHTCPPCPAPELLGGPSVYLYPPKPKDTLMISRTPEVTCTVTDVSHEDPEVKFNWYVDGVEVHNAKTKPREEQYDSTYRVVSVLTVLHQDWLNGKEYKCKVSNKALPAPEEKTISKAKGQPREPQVYTLPPSRDELTKNQVSLTCLVKGFYPSDIAVEWESNGQPENNYKTTPPVLDSDGSFFLYSKLTVDKSRWQQGNVFSCSVMHEALHNHYTQKSLSLSPGK

SEQ ID NO: 523 - protein, 248 aa, Artificial
  Synthetic
CNVNHKPSNTKVDKKVEPKSCDKTHTCPPCPAPELLGGPSVFLFPPKPKDTLMISRTPEVTCVVVDVSHEDPEVKFNWYVDGVEVHNAKTKPREEQYNSTYRVVSVLTVLHQDWLNGKEYKCKVSNKALPYPEEKTISKAKGQPREPQVYTLPPSRDELTKNQVSLTCLVKGFYPSDIAVEWESNGQPENNYKTTPPVLDSDGSFFLYSKLTVDKSRWQQGNVFSCSVMHEALHNHYTQKSLSLSPGK

SEQ ID NO: 524 - protein, 248 aa, Artificial
  Synthetic
CNVNHKPSNTKVDKKVEPKSCDKTHTCPPCPAPELLGGPSVFLFPPKPKDTLMISRTPEVTCVVIDVSHEDPEVKFNWYVDGVEVHNAKTKPREEQYNSTYRVVSVLTVLHQDWLNGKEYKCKVSNKALPYPEEKTISKAKGQPREPQVYTLPPSRDELTKNQVSLTCLVKGFYPSDIAVEWESNGQPENNYKTTPPVLDSDGSFFLYSKLTVDKSRWQQGNVFSCSVMHEALHNHYTQKSLSLSPGK

SEQ ID NO: 525 - protein, 248 aa, Artificial
  Synthetic
CNVNHKPSNTKVDKKVEPKSCDKTHTCPPCPAPELLGGPSVFLFPPKPKDTLMISRTPEVTCVVVDVSHEDPEVKFNWYVDGVEVHNAKTKPREEQYNSTYRVVSVLTVLHQDWLNGKEYKCKVSNKALPLPEEKTISKAKGQPREPQVYTLPPSRDELTKNQVSLTCLVKGFYPSDIAVEWESNGQPENNYKTTPPVLDSDGSFFLYSKLTVDKSRWQQGNVFSCSVMHEALHNHYTQKSLSLSPGK

SEQ ID NO: 526 - protein, 248 aa, Artificial
  Synthetic
CNVNHKPSNTKVDKKVEPKSCDKTHTCPPCPAPELLGGPSVFLFPPKPKDTLMISRTPEVTCVVIDVSHEDPEVKFNWYVDGVEVHNAKTKPREEQYNSTYRVVSVLTVLHQDWLNGKEYKCKVSNKALPLPEEKTISKAKGQPREPQVYTLPPSRDELTKNQVSLTCLVKGFYPSDIAVEWESNGQPENNYKTTPPVLDSDGSFFLYSKLTVDKSRWQQGNVFSCSVMHEALHNHYTQKSLSLSPGK

SEQ ID NO: 527 - protein, 248 aa, Artificial
  Synthetic
CNVNHKPSNTKVDKKVEPKSCDKTHTCPPCPAPEDLGGPSVFLFPPKPKDTLMISRTPEVTCVVVDVSHEDPEVKFNWYVDGVEVHNAKTKPREEQYNSTYRVVSVLTVLHQDWLNGKEYKCKVSNKALPAPIEKTISKAKGQPREPQVYTLPPSRDELTKNQVSLTCLVKGFYPSDIAVEWESNGQPENNYKTTPPVLDSDGSFFLYSKLTVDKSRWQQGNVFSCSVMHEALHNHYTQKSLSLSPGK

SEQ ID NO: 528 - protein, 248 aa, Artificial
  Synthetic
CNVNHKPSNTKVDKKVEPKSCDKTHTCPPCPAPEELGGPSVFLFPPKPKDTLMISRTPEVTCVVVDVSHEDPEVKFNWYVDGVEVHNAKTKPREEQYNSTYRVVSVLTVLHQDWLNGKEYKCKVSNKALPAPIEKTISKAKGQPREPQVYTLPPSRDELTKNQVSLTCLVKGFYPSDIAVEWESNGQPENNYKTTPPVLDSDGSFFLYSKLTVDKSRWQQGNVFSCSVMHEALHNHYTQKSLSLSPGK

SEQ ID NO: 529 - protein, 248 aa, Artificial
  Synthetic
CNVNHKPSNTKVDKKVEPKSCDKTHTCPPCPAPENLGGPSVFLFPPKPKDTLMISRTPEVTCVVVDVSHEDPEVKFNWYVDGVEVHNAKTKPREEQYNSTYRVVSVLTVLHQDWLNGKEYKCKVSNKALPAPIEKTISKAKGQPREPQVYTLPPSRDELTKNQVSLTCLVKGFYPSDIAVEWESNGQPENNYKTTPPVLDSDGSFFLYSKLTVDKSRWQQGNVFSCSVMHEALHNHYTQKSLSLSPGK

SEQ ID NO: 530 - protein, 248 aa, Artificial
  Synthetic
CNVNHKPSNTKVDKKVEPKSCDKTHTCPPCPAPEQLGGPSVFLFPPKPKDTLMISRTPEVTCVVVDVSHEDPEVKFNWYVDGVEVHNAKTKPREEQYNSTYRVVSVLTVLHQDWLNGKEYKCKVSNKALPAPIEKTISKAKGQPREPQVYTLPPSRDELTKNQVSLTCLVKGFYPSDIAVEWESNGQPENNYKTTPPVLDSDGSFFLYSKLTVDKSRWQQGNVFSCSVMHEALHNHYTQKSLSLSPGK

SEQ ID NO: 531 - protein, 248 aa, Artificial
  Synthetic
CNVNHKPSNTKVDKKVEPKSCDKTHTCPPCPAPETLGGPSVFLFPPKPKDTLMISRTPEVTCVVVDVSHEDPEVKFNWYVDGVEVHNAKTKPREEQYNSTYRVVSVLTVLHQDWLNGKEYKCKVSNKALPAPIEKTISKAKGQPREPQVYTLPPSRDELTKNQVSLTCLVKGFYPSDIAVEWESNGQPENNYKTTPPVLDSDGSFFLYSKLTVDKSRWQQGNVFSCSVMHEALHNHYTQKSLSLSPGK

SEQ ID NO: 532 - protein, 248 aa, Artificial
  Synthetic
CNVNHKPSNTKVDKKVEPKSCDKTHTCPPCPAPEHLGGPSVFLFPPKPKDTLMISRTPEVTCVVVDVSHEDPEVKFNWYVDGVEVHNAKTKPREEQYNSTYRVVSVLTVLHQDWLNGKEYKCKVSNKALPAPIEKTISKAKGQPREPQVYTLPPSRDELTKNQVSLTCLVKGFYPSDIAVEWESNGQPENNYKTTPPVLDSDGSFFLYSKLTVDKSRWQQGNVFSCSVMHEALHNHYTQKSLSLSPGK

SEQ ID NO: 533 - protein, 248 aa, Artificial
  Synthetic
CNVNHKPSNTKVDKKVEPKSCDKTHTCPPCPAPEYLGGPSVFLFPPKPKDTLMISRTPEVTCVVVDVSHEDPEVKFNWYVDGVEVHNAKTKPREEQYNSTYRVVSVLTVLHQDWLNGKEYKCKVSNKALPAPIEKTISKAKGQPREPQVYTLPPSRDELTKNQVSLTCLVKGFYPSDIAVEWESNGQPENNYKTTPPVLDSDGSFFLYSKLTVDKSRWQQGNVFSCSVMHEALHNHYTQKSLSLSPGK

SEQ ID NO: 534 - protein, 248 aa, Artificial
  Synthetic
CNVNHKPSNTKVDKKVEPKSCDKTHTCPPCPAPEILGGPSVFLFPPKPKDTLMISRTPEVTCVVVDVSHEDPEVKFNWYVDGVEVHNAKTKPREEQYNSTYRVVSVLTVLHQDWLNGKEYKCKVSNKALPAPIEKTISKAKGQPREPQVYTLPPSRDELTKNQVSLTCLVKGFYPSDIAVEWESNGQPENNYKTTPPVLDSDGSFFLYSKLTVDKSRWQQGNVFSCSVMHEALHNHYTQKSLSLSPGK

SEQ ID NO: 535 - protein, 248 aa, Artificial
  Synthetic
CNVNHKPSNTKVDKKVEPKSCDKTHTCPPCPAPEVLGGPSVFLFPPKPKDTLMISRTPEVTCVVVDVSHEDPEVKFNWYVDGVEVHNAKTKPREEQYNSTYRVVSVLTVLHQDWLNGKEYKCKVSNKALPAPIEKTISKAKGQPREPQVYTLPPSRDELTKNQVSLTCLVKGFYPSDIAVEWESNGQPENNYKTTPPVLDSDGSFFLYSKLTVDKSRWQQGNVFSCSVMHEALHNHYTQKSLSLSPGK

SEQ ID NO: 536 - protein, 248 aa, Artificial
  Synthetic
CNVNHKPSNTKVDKKVEPKSCDKTHTCPPCPAPEFLGGPSVFLFPPKPKDTLMISRTPEVTCVVVDVSHEDPEVKFNWYVDGVEVHNAKTKPREEQYNSTYRVVSVLTVLHQDWLNGKEYKCKVSNKALPAPIEKTISKAKGQPREPQVYTLPPSRDELTKNQVSLTCLVKGFYPSDIAVEWESNGQPENNYKTTPPVLDSDGSFFLYSKLTVDKSRWQQGNVFSCSVMHEALHNHYTQKSLSLSPGK

SEQ ID NO: 537 - protein, 248 aa, Artificial
  Synthetic
CNVNHKPSNTKVDKKVEPKSCDKTHTCPPCPAPELDGGPSVFLFPPKPKDTLMISRTPEVTCVVVDVSHEDPEVKFNWYVDGVEVHNAKTKPREEQYNSTYRVVSVLTVLHQDWLNGKEYKCKVSNKALPAPIEKTISKAKGQPREPQVYTLPPSRDELTKNQVSLTCLVKGFYPSDIAVEWESNGQPENNYKTTPPVLDSDGSFFLYSKLTVDKSRWQQGNVFSCSVMHEALHNHYTQKSLSLSPGK

SEQ ID NO: 538 - protein, 248 aa, Artificial
  Synthetic
CNVNHKPSNTKVDKKVEPKSCDKTHTCPPCPAPELSGGPSVFLFPPKPKDTLMISRTPEVTCVVVDVSHEDPEVKFNWYVDGVEVHNAKTKPREEQYNSTYRVVSVLTVLHQDWLNGKEYKCKVSNKALPAPIEKTISKAKGQPREPQVYTLPPSRDELTKNQVSLTCLVKGFYPSDIAVEWESNGQPENNYKTTPPVLDSDGSFFLYSKLTVDKSRWQQGNVFSCSVMHEALHNHYTQKSLSLSPGK

SEQ ID NO: 539 - protein, 248 aa, Artificial
  Synthetic
CNVNHKPSNTKVDKKVEPKSCDKTHTCPPCPAPELNGGPSVFLFPPKPKDTLMISRTPEVTCVVVDVSHEDPEVKFNWYVDGVEVHNAKTKPREEQYNSTYRVVSVLTVLHQDWLNGKEYKCKVSNKALPAPIEKTISKAKGQPREPQVYTLPPSRDELTKNQVSLTCLVKGFYPSDIAVEWESNGQPENNYKTTPPVLDSDGSFFLYSKLTVDKSRWQQGNVFSCSVMHEALHNHYTQKSLSLSPGK

SEQ ID NO: 540 - protein, 248 aa, Artificial
  Synthetic
CNVNHKPSNTKVDKKVEPKSCDKTHTCPPCPAPELQGGPSVFLFPPKPKDTLMISRTPEVTCVVVDVSHEDPEVKFNWYVDGVEVHNAKTKPREEQYNSTYRVVSVLTVLHQDWLNGKEYKCKVSNKALPAPIEKTISKAKGQPREPQVYTLPPSRDELTKNQVSLTCLVKGFYPSDIAVEWESNGQPENNYKTTPPVLDSDGSFFLYSKLTVDKSRWQQGNVFSCSVMHEALHNHYTQKSLSLSPGK

SEQ ID NO: 541 - protein, 248 aa, Artificial
  Synthetic
CNVNHKPSNTKVDKKVEPKSCDKTHTCPPCPAPELTGGPSVFLFPPKPKDTLMISRTPEVTCVVVDVSHEDPEVKFNWYVDGVEVHNAKTKPREEQYNSTYRVVSVLTVLHQDWLNGKEYKCKVSNKALPAPIEKTISKAKGQPREPQVYTLPPSRDELTKNQVSLTCLVKGFYPSDIAVEWESNGQPENNYKTTPPVLDSDGSFFLYSKLTVDKSRWQQGNVFSCSVMHEALHNHYTQKSLSLSPGK

SEQ ID NO: 542 - protein, 248 aa, Artificial
  Synthetic
CNVNHKPSNTKVDKKVEPKSCDKTHTCPPCPAPELHGGPSVFLFPPKPKDTLMISRTPEVTCVVVDVSHEDPEVKFNWYVDGVEVHNAKTKPREEQYNSTYRVVSVLTVLHQDWLNGKEYKCKVSNKALPAPIEKTISKAKGQPREPQVYTLPPSRDELTKNQVSLTCLVKGFYPSDIAVEWESNGQPENNYKTTPPVLDSDGSFFLYSKLTVDKSRWQQGNVFSCSVMHEALHNHYTQKSLSLSPGK

SEQ ID NO: 543 - protein, 248 aa, Artificial
  Synthetic
CNVNHKPSNTKVDKKVEPKSCDKTHTCPPCPAPELYGGPSVFLFPPKPKDTLMISRTPEVTCVVVDVSHEDPEVKFNWYVDGVEVHNAKTKPREEQYNSTYRVVSVLTVLHQDWLNGKEYKCKVSNKALPAPIEKTISKAKGQPREPQVYTLPPSRDELTKNQVSLTCLVKGFYPSDIAVEWESNGQPENNYKTTPPVLDSDGSFFLYSKLTVDKSRWQQGNVFSCSVMHEALHNHYTQKSLSLSPGK

SEQ ID NO: 544 - protein, 248 aa, Artificial
  Synthetic
CNVNHKPSNTKVDKKVEPKSCDKTHTCPPCPAPELIGGPSVFLFPPKPKDTLMISRTPEVTCVVVDVSHEDPEVKFNWYVDGVEVHNAKTKPREEQYNSTYRVVSVLTVLHQDWLNGKEYKCKVSNKALPAPIEKTISKAKGQPREPQVYTLPPSRDELTKNQVSLTCLVKGFYPSDIAVEWESNGQPENNYKTTPPVLDSDGSFFLYSKLTVDKSRWQQGNVFSCSVMHEALHNHYTQKSLSLSPGK

SEQ ID NO: 545 - protein, 248 aa, Artificial
  Synthetic
CNVNHKPSNTKVDKKVEPKSCDKTHTCPPCPAPELVGGPSVFLFPPKPKDTLMISRTPEVTCVVVDVSHEDPEVKFNWYVDGVEVHNAKTKPREEQYNSTYRVVSVLTVLHQDWLNGKEYKCKVSNKALPAPIEKTISKAKGQPREPQVYTLPPSRDELTKNQVSLTCLVKGFYPSDIAVEWESNGQPENNYKTTPPVLDSDGSFFLYSKLTVDKSRWQQGNVFSCSVMHEALHNHYTQKSLSLSPGK

SEQ ID NO: 546 - protein, 248 aa, Artificial
  Synthetic
CNVNHKPSNTKVDKKVEPKSCDKTHTCPPCPAPELFGGPSVFLFPPKPKDTLMISRTPEVTCVVVDVSHEDPEVKFNWYVDGVEVHNAKTKPREEQYNSTYRVVSVLTVLHQDWLNGKEYKCKVSNKALPAPIEKTISKAKGQPREPQVYTLPPSRDELTKNQVSLTCLVKGFYPSDIAVEWESNGQPENNYKTTPPVLDSDGSFFLYSKLTVDKSRWQQGNVFSCSVMHEALHNHYTQKSLSLSPGK

SEQ ID NO: 547 - protein, 248 aa, Artificial
  Synthetic
CNVNHKPSNTKVDKKVEPKSCDKTHTCPPCPAPELLGGPTVFLFPPKPKDTLMISRTPEVTCVVVDVSHEDPEVKFNWYVDGVEVHNAKTKPREEQYNSTYRVVSVLTVLHQDWLNGKEYKCKVSNKALPAPIEKTISKAKGQPREPQVYTLPPSRDELTKNQVSLTCLVKGFYPSDIAVEWESNGQPENNYKTTPPVLDSDGSFFLYSKLTVDKSRWQQGNVFSCSVMHEALHNHYTQKSLSLSPGK

SEQ ID NO: 548 - protein, 248 aa, Artificial
  Synthetic
CNVNHKPSNTKVDKKVEPKSCDKTHTCPPCPAPELLGGPHVFLFPPKPKDTLMISRTPEVTCVVVDVSHEDPEVKFNWYVDGVEVHNAKTKPREEQYNSTYRVVSVLTVLHQDWLNGKEYKCKVSNKALPAPIEKTISKAKGQPREPQVYTLPPSRDELTKNQVSLTCLVKGFYPSDIAVEWESNGQPENNYKTTPPVLDSDGSFFLYSKLTVDKSRWQQGNVFSCSVMHEALHNHYTQKSLSLSPGK

SEQ ID NO: 549 - protein, 248 aa, Artificial
  Synthetic
CNVNHKPSNTKVDKKVEPKSCDKTHTCPPCPAPELLGGPYVFLFPPKPKDTLMISRTPEVTCVVVDVSHEDPEVKFNWYVDGVEVHNAKTKPREEQYNSTYRVVSVLTVLHQDWLNGKEYKCKVSNKALPAPIEKTISKAKGQPREPQVYTLPPSRDELTKNQVSLTCLVKGFYPSDIAVEWESNGQPENNYKTTPPVLDSDGSFFLYSKLTVDKSRWQQGNVFSCSVMHEALHNHYTQKSLSLSPGK

SEQ ID NO: 550 - protein, 248 aa, Artificial
  Synthetic
CNVNHKPSNTKVDKKVEPKSCDKTHTCPPCPAPELLGGPSAFLFPPKPKDTLMISRTPEVTCVVVDVSHEDPEVKFNWYVDGVEVHNAKTKPREEQYNSTYRVVSVLTVLHQDWLNGKEYKCKVSNKALPAPIEKTISKAKGQPREPQVYTLPPSRDELTKNQVSLTCLVKGFYPSDIAVEWESNGQPENNYKTTPPVLDSDGSFFLYSKLTVDKSRWQQGNVFSCSVMHEALHNHYTQKSLSLSPGK

SEQ ID NO: 551 - protein, 248 aa, Artificial
  Synthetic
CNVNHKPSNTKVDKKVEPKSCDKTHTCPPCPAPELLGGPSTFLFPPKPKDTLMISRTPEVTCVVVDVSHEDPEVKFNWYVDGVEVHNAKTKPREEQYNSTYRVVSVLTVLHQDWLNGKEYKCKVSNKALPAPIEKTISKAKGQPREPQVYTLPPSRDELTKNQVSLTCLVKGFYPSDIAVEWESNGQPENNYKTTPPVLDSDGSFFLYSKLTVDKSRWQQGNVFSCSVMHEALHNHYTQKSLSLSPGK

SEQ ID NO: 552 - protein, 248 aa, Artificial
  Synthetic
CNVNHKPSNTKVDKKVEPKSCDKTHTCPPCPAPELLGGPSMFLFPPKPKDTLMISRTPEVTCVVVDVSHEDPEVKFNWYVDGVEVHNAKTKPREEQYNSTYRVVSVLTVLHQDWLNGKEYKCKVSNKALPAPIEKTISKAKGQPREPQVYTLPPSRDELTKNQVSLTCLVKGFYPSDIAVEWESNGQPENNYKTTPPVLDSDGSFFLYSKLTVDKSRWQQGNVFSCSVMHEALHNHYTQKSLSLSPGK

SEQ ID NO: 553 - protein, 248 aa, Artificial
  Synthetic
CNVNHKPSNTKVDKKVEPKSCDKTHTCPPCPAPELLGGPSVFLFPPKPKDTLMISRTPEVTCVAVDVSHEDPEVKFNWYVDGVEVHNAKTKPREEQYNSTYRVVSVLTVLHQDWLNGKEYKCKVSNKALPAPIEKTISKAKGQPREPQVYTLPPSRDELTKNQVSLTCLVKGFYPSDIAVEWESNGQPENNYKTTPPVLDSDGSFFLYSKLTVDKSRWQQGNVFSCSVMHEALHNHYTQKSLSLSPGK

SEQ ID NO: 554 - protein, 248 aa, Artificial
  Synthetic
CNVNHKPSNTKVDKKVEPKSCDKTHTCPPCPAPELLGGPSVFLFPPKPKDTLMISRTPEVTCVTVDVSHEDPEVKFNWYVDGVEVHNAKTKPREEQYNSTYRVVSVLTVLHQDWLNGKEYKCKVSNKALPAPIEKTISKAKGQPREPQVYTLPPSRDELTKNQVSLTCLVKGFYPSDIAVEWESNGQPENNYKTTPPVLDSDGSFFLYSKLTVDKSRWQQGNVFSCSVMHEALHNHYTQKSLSLSPGK

SEQ ID NO: 555 - protein, 248 aa, Artificial
  Synthetic
CNVNHKPSNTKVDKKVEPKSCDKTHTCPPCPAPELLGGPSVFLFPPKPKDTLMISRTPEVTCVMVDVSHEDPEVKFNWYVDGVEVHNAKTKPREEQYNSTYRVVSVLTVLHQDWLNGKEYKCKVSNKALPAPIEKTISKAKGQPREPQVYTLPPSRDELTKNQVSLTCLVKGFYPSDIAVEWESNGQPENNYKTTPPVLDSDGSFFLYSKLTVDKSRWQQGNVFSCSVMHEALHNHYTQKSLSLSPGK

SEQ ID NO: 556 - protein, 248 aa, Artificial
  Synthetic
CNVNHKPSNTKVDKKVEPKSCDKTHTCPPCPAPELLGGPSVFLFPPKPKDTLMISRTPEVTCVVMDVSHEDPEVKFNWYVDGVEVHNAKTKPREEQYNSTYRVVSVLTVLHQDWLNGKEYKCKVSNKALPAPIEKTISKAKGQPREPQVYTLPPSRDELTKNQVSLTCLVKGFYPSDIAVEWESNGQPENNYKTTPPVLDSDGSFFLYSKLTVDKSRWQQGNVFSCSVMHEALHNHYTQKSLSLSPGK

SEQ ID NO: 557 - protein, 248 aa, Artificial
  Synthetic
CNVNHKPSNTKVDKKVEPKSCDKTHTCPPCPAPELLGGPSVFLFPPKPKDTLMISRTPEVTCVVYDVSHEDPEVKFNWYVDGVEVHNAKTKPREEQYNSTYRVVSVLTVLHQDWLNGKEYKCKVSNKALPAPIEKTISKAKGQPREPQVYTLPPSRDELTKNQVSLTCLVKGFYPSDIAVEWESNGQPENNYKTTPPVLDSDGSFFLYSKLTVDKSRWQQGNVFSCSVMHEALHNHYTQKSLSLSPGK

SEQ ID NO: 558 - protein, 248 aa, Artificial
  Synthetic
CNVNHKPSNTKVDKKVEPKSCDKTHTCPPCPAPELLGGPSVFLFPPKPKDTLMISRTPEVTCVVVDASHEDPEVKFNWYVDGVEVHNAKTKPREEQYNSTYRVVSVLTVLHQDWLNGKEYKCKVSNKALPAPIEKTISKAKGQPREPQVYTLPPSRDELTKNQVSLTCLVKGFYPSDIAVEWESNGQPENNYKTTPPVLDSDGSFFLYSKLTVDKSRWQQGNVFSCSVMHEALHNHYTQKSLSLSPGK

SEQ ID NO: 559 - protein, 248 aa, Artificial
  Synthetic
CNVNHKPSNTKVDKKVEPKSCDKTHTCPPCPAPELLGGPSVFLFPPKPKDTLMISRTPEVTCVVVDTSHEDPEVKFNWYVDGVEVHNAKTKPREEQYNSTYRVVSVLTVLHQDWLNGKEYKCKVSNKALPAPIEKTISKAKGQPREPQVYTLPPSRDELTKNQVSLTCLVKGFYPSDIAVEWESNGQPENNYKTTPPVLDSDGSFFLYSKLTVDKSRWQQGNVFSCSVMHEALHNHYTQKSLSLSPGK

SEQ ID NO: 560 - protein, 248 aa, Artificial
  Synthetic
CNVNHKPSNTKVDKKVEPKSCDKTHTCPPCPAPELLGGPSVFLFPPKPKDTLMISRTPEVTCVVVDMSHEDPEVKFNWYVDGVEVHNAKTKPREEQYNSTYRVVSVLTVLHQDWLNGKEYKCKVSNKALPAPIEKTISKAKGQPREPQVYTLPPSRDELTKNQVSLTCLVKGFYPSDIAVEWESNGQPENNYKTTPPVLDSDGSFFLYSKLTVDKSRWQQGNVFSCSVMHEALHNHYTQKSLSLSPGK

SEQ ID NO: 561 - protein, 248 aa, Artificial
  Synthetic
CNVNHKPSNTKVDKKVEPKSCDKTHTCPPCPAPELLGGPSVFLFPPKPKDTLMISRTPEVTCVVVDVSHHDPEVKFNWYVDGVEVHNAKTKPREEQYNSTYRVVSVLTVLHQDWLNGKEYKCKVSNKALPAPIEKTISKAKGQPREPQVYTLPPSRDELTKNQVSLTCLVKGFYPSDIAVEWESNGQPENNYKTTPPVLDSDGSFFLYSKLTVDKSRWQQGNVFSCSVMHEALHNHYTQKSLSLSPGK

SEQ ID NO: 562 - protein, 248 aa, Artificial
  Synthetic
CNVNHKPSNTKVDKKVEPKSCDKTHTCPPCPAPELLGGPSVFLFPPKPKDTLMISRTPEVTCVVVDVSHYDPEVKFNWYVDGVEVHNAKTKPREEQYNSTYRVVSVLTVLHQDWLNGKEYKCKVSNKALPAPIEKTISKAKGQPREPQVYTLPPSRDELTKNQVSLTCLVKGFYPSDIAVEWESNGQPENNYKTTPPVLDSDGSFFLYSKLTVDKSRWQQGNVFSCSVMHEALHNHYTQKSLSLSPGK

SEQ ID NO: 563 - protein, 248 aa, Artificial
  Synthetic
CNVNHKPSNTKVDKKVEPKSCDKTHTCPPCPAPELLGGPSVFLFPPKPKDTLMISRTPEVTCVVVDVSHFDPEVKFNWYVDGVEVHNAKTKPREEQYNSTYRVVSVLTVLHQDWLNGKEYKCKVSNKALPAPIEKTISKAKGQPREPQVYTLPPSRDELTKNQVSLTCLVKGFYPSDIAVEWESNGQPENNYKTTPPVLDSDGSFFLYSKLTVDKSRWQQGNVFSCSVMHEALHNHYTQKSLSLSPGK

SEQ ID NO: 564 - protein, 248 aa, Artificial
  Synthetic
CNVNHKPSNTKVDKKVEPKSCDKTHTCPPCPAPELLGGPSVFLFPPKPKDTLMISRTPEVTCVVVDVSHRDPEVKFNWYVDGVEVHNAKTKPREEQYNSTYRVVSVLTVLHQDWLNGKEYKCKVSNKALPAPIEKTISKAKGQPREPQVYTLPPSRDELTKNQVSLTCLVKGFYPSDIAVEWESNGQPENNYKTTPPVLDSDGSFFLYSKLTVDKSRWQQGNVFSCSVMHEALHNHYTQKSLSLSPGK

SEQ ID NO: 565 - protein, 248 aa, Artificial
  Synthetic
CNVNHKPSNTKVDKKVEPKSCDKTHTCPPCPAPELLGGPSVFLFPPKPKDTLMISRTPEVTCVVVDVSHEDPEVKFNWYVDGVEVHNAKTKPREEQSNSTYRVVSVLTVLHQDWLNGKEYKCKVSNKALPAPIEKTISKAKGQPREPQVYTLPPSRDELTKNQVSLTCLVKGFYPSDIAVEWESNGQPENNYKTTPPVLDSDGSFFLYSKLTVDKSRWQQGNVFSCSVMHEALHNHYTQKSLSLSPGK

SEQ ID NO: 566 - protein, 248 aa, Artificial
  Synthetic
CNVNHKPSNTKVDKKVEPKSCDKTHTCPPCPAPELLGGPSVFLFPPKPKDTLMISRTPEVTCVVVDVSHEDPEVKFNWYVDGVEVHNAKTKPREEQTNSTYRVVSVLTVLHQDWLNGKEYKCKVSNKALPAPIEKTISKAKGQPREPQVYTLPPSRDELTKNQVSLTCLVKGFYPSDIAVEWESNGQPENNYKTTPPVLDSDGSFFLYSKLTVDKSRWQQGNVFSCSVMHEALHNHYTQKSLSLSPGK

SEQ ID NO: 567 - protein, 248 aa, Artificial
  Synthetic
CNVNHKPSNTKVDKKVEPKSCDKTHTCPPCPAPELLGGPSVFLFPPKPKDTLMISRTPEVTCVVVDVSHEDPEVKFNWYVDGVEVHNAKTKPREEQLNSTYRVVSVLTVLHQDWLNGKEYKCKVSNKALPAPIEKTISKAKGQPREPQVYTLPPSRDELTKNQVSLTCLVKGFYPSDIAVEWESNGQPENNYKTTPPVLDSDGSFFLYSKLTVDKSRWQQGNVFSCSVMHEALHNHYTQKSLSLSPGK

SEQ ID NO: 568 - protein, 248 aa, Artificial
  Synthetic
CNVNHKPSNTKVDKKVEPKSCDKTHTCPPCPAPELLGGPSVFLFPPKPKDTLMISRTPEVTCVVVDVSHEDPEVKFNWYVDGVEVHNAKTKPREEQINSTYRVVSVLTVLHQDWLNGKEYKCKVSNKALPAPIEKTISKAKGQPREPQVYTLPPSRDELTKNQVSLTCLVKGFYPSDIAVEWESNGQPENNYKTTPPVLDSDGSFFLYSKLTVDKSRWQQGNVFSCSVMHEALHNHYTQKSLSLSPGK

SEQ ID NO: 569 - protein, 248 aa, Artificial
  Synthetic
CNVNHKPSNTKVDKKVEPKSCDKTHTCPPCPAPELLGGPSVFLFPPKPKDTLMISRTPEVTCVVVDVSHEDPEVKFNWYVDGVEVHNAKTKPREEQYNHTYRVVSVLTVLHQDWLNGKEYKCKVSNKALPAPIEKTISKAKGQPREPQVYTLPPSRDELTKNQVSLTCLVKGFYPSDIAVEWESNGQPENNYKTTPPVLDSDGSFFLYSKLTVDKSRWQQGNVFSCSVMHEALHNHYTQKSLSLSPGK

SEQ ID NO: 570 - protein, 248 aa, Artificial
  Synthetic
CNVNHKPSNTKVDKKVEPKSCDKTHTCPPCPAPELLGGPSVFLFPPKPKDTLMISRTPEVTCVVVDVSHEDPEVKFNWYVDGVEVHNAKTKPREEQYNSHYRVVSVLTVLHQDWLNGKEYKCKVSNKALPAPIEKTISKAKGQPREPQVYTLPPSRDELTKNQVSLTCLVKGFYPSDIAVEWESNGQPENNYKTTPPVLDSDGSFFLYSKLTVDKSRWQQGNVFSCSVMHEALHNHYTQKSLSLSPGK

SEQ ID NO: 571 - protein, 248 aa, Artificial
  Synthetic
CNVNHKPSNTKVDKKVEPKSCDKTHTCPPCPAPELLGGPSVFLFPPKPKDTLMISRTPEVTCVVVDVSHEDPEVKFNWYVDGVEVHNAKTKPREEQYNSTYRVVSVLTVLHQDWLNGKEYKCKVSNKALPVPIEKTISKAKGQPREPQVYTLPPSRDELTKNQVSLTCLVKGFYPSDIAVEWESNGQPENNYKTTPPVLDSDGSFFLYSKLTVDKSRWQQGNVFSCSVMHEALHNHYTQKSLSLSPGK

SEQ ID NO: 572 - protein, 248 aa, Artificial
  Synthetic
CNVNHKPSNTKVDKKVEPKSCDKTHTCPPCPAPELLGGPSVFLFPPKPKDTLMISRTPEVTCVVVDVSHEDPEVKFNWYVDGVEVHNAKTKPREEQYNSTYRVVSVLTVLHQDWLNGKEYKCKVSNKALPIPIEKTISKAKGQPREPQVYTLPPSRDELTKNQVSLTCLVKGFYPSDIAVEWESNGQPENNYKTTPPVLDSDGSFFLYSKLTVDKSRWQQGNVFSCSVMHEALHNHYTQKSLSLSPGK

SEQ ID NO: 573 - protein, 248 aa, Artificial
  Synthetic
CNVNHKPSNTKVDKKVEPKSCDKTHTCPPCPAPELLGGPSVFLFPPKPKDTLMISRTPEVTCVVVDVSHEDPEVKFNWYVDGVEVHNAKTKPREEQYNSTYRVVSVLTVLHQDWLNGKEYKCKVSNKALPFPIEKTISKAKGQPREPQVYTLPPSRDELTKNQVSLTCLVKGFYPSDIAVEWESNGQPENNYKTTPPVLDSDGSFFLYSKLTVDKSRWQQGNVFSCSVMHEALHNHYTQKSLSLSPGK

SEQ ID NO: 574 - protein, 248 aa, Artificial
  Synthetic
CNVNHKPSNTKVDKKVEPKSCDKTHTCPPCPAPELLGGPSVFLFPPKPKDTLMISRTPEVTCVVVDVSHEDPEVKFNWYVDGVEVHNAKTKPREEQYNSTYRVVSVLTVLHQDWLNGKEYKCKVSNKALPRPIEKTISKAKGQPREPQVYTLPPSRDELTKNQVSLTCLVKGFYPSDIAVEWESNGQPENNYKTTPPVLDSDGSFFLYSKLTVDKSRWQQGNVFSCSVMHEALHNHYTQKSLSLSPGK

SEQ ID NO: 575 - protein, 248 aa, Artificial
  Synthetic
CNVNHKPSNTKVDKKVEPKSCDKTHTCPPCPAPELLGGPSVFLFPPKPKDTLMISRTPEVTCVVVDVSHEDPEVKFNWYVDGVEVHNAKTKPREEQYNSTYRVVSVLTVLHQDWLNGKEYKCKVSNKALPHPIEKTISKAKGQPREPQVYTLPPSRDELTKNQVSLTCLVKGFYPSDIAVEWESNGQPENNYKTTPPVLDSDGSFFLYSKLTVDKSRWQQGNVFSCSVMHEALHNHYTQKSLSLSPGK

SEQ ID NO: 576 - protein, 248 aa, Artificial
  Synthetic
CNVNHKPSNTKVDKKVEPKSCDKTHTCPPCPAPELLGGPSVFLFPPKPKDTLMISRTPEVTCVVVDVSHEDPEVKFNWYVDGVEVHNAKTKPREEQYNSTYRVVSVLTVLHQDWLNGKEYKCKVSDKALPAPIEKTISKAKGQPREPQVYTLPPSRDELTKNQVSLTCLVKGFYPSDIAVEWESNGQPENNYKTTPPVLDSDGSFFLYSKLTVDKSRWQQGNVFSCSVMHEALHNHYTQKSLSLSPGK

SEQ ID NO: 577 - protein, 248 aa, Artificial
  Synthetic
CNVNHKPSNTKVDKKVEPKSCDKTHTCPPCPAPELLGGPSVFLFPPKPKDTLMISRTPEVTCVVVDVSHEDPEVKFNWYVDGVEVHNAKTKPREEQYNSTYRVVSVLTVLHQDWLNGKEYKCKVSEKALPAPIEKTISKAKGQPREPQVYTLPPSRDELTKNQVSLTCLVKGFYPSDIAVEWESNGQPENNYKTTPPVLDSDGSFFLYSKLTVDKSRWQQGNVFSCSVMHEALHNHYTQKSLSLSPGK

SEQ ID NO: 578 - protein, 248 aa, Artificial
  Synthetic
CNVNHKPSNTKVDKKVEPKSCDKTHTCPPCPAPELLGGPSVFLFPPKPKDTLMISRTPEVTCVVVDVSHEDPEVKFNWYVDGVEVHNAKTKPREEQYNSTYRVVSVLTVLHQDWLNGKEYKCKVSAKALPAPIEKTISKAKGQPREPQVYTLPPSRDELTKNQVSLTCLVKGFYPSDIAVEWESNGQPENNYKTTPPVLDSDGSFFLYSKLTVDKSRWQQGNVFSCSVMHEALHNHYTQKSLSLSPGK

SEQ ID NO: 579 - protein, 248 aa, Artificial
  Synthetic
CNVNHKPSNTKVDKKVEPKSCDKTHTCPPCPAPELLGGPSVFLFPPKPKDTLMISRTPEVTCVVVDVSHEDPEVKFNWYVDGVEVHNAKTKPREEQYNSTYRVVSVLTVLHQDWLNGKEYKCKVSTKALPAPIEKTISKAKGQPREPQVYTLPPSRDELTKNQVSLTCLVKGFYPSDIAVEWESNGQPENNYKTTPPVLDSDGSFFLYSKLTVDKSRWQQGNVFSCSVMHEALHNHYTQKSLSLSPGK

SEQ ID NO: 580 - protein, 248 aa, Artificial
  Synthetic
CNVNHKPSNTKVDKKVEPKSCDKTHTCPPCPAPELLGGPSVFLFPPKPKDTLMISRTPEVTCVVVDVSHEDPEVKFNWYVDGVEVHNAKTKPREEQYNSTYRVVSVLTVLHQDWLNGKEYKCKVSVKALPAPIEKTISKAKGQPREPQVYTLPPSRDELTKNQVSLTCLVKGFYPSDIAVEWESNGQPENNYKTTPPVLDSDGSFFLYSKLTVDKSRWQQGNVFSCSVMHEALHNHYTQKSLSLSPGK

SEQ ID NO: 581 - protein, 248 aa, Artificial
  Synthetic
CNVNHKPSNTKVDKKVEPKSCDKTHTCPPCPAPELLGGPSVFLFPPKPKDTLMISRTPEVTCVVVDVSHEDPEVKFNWYVDGVEVHNAKTKPREEQYNSTYRVVSVLTVLHQDWLNGKEYKCKVSHKALPAPIEKTISKAKGQPREPQVYTLPPSRDELTKNQVSLTCLVKGFYPSDIAVEWESNGQPENNYKTTPPVLDSDGSFFLYSKLTVDKSRWQQGNVFSCSVMHEALHNHYTQKSLSLSPGK

SEQ ID NO: 582 - protein, 248 aa, Artificial
  Synthetic
CNVNHKPSNTKVDKKVEPKSCDKTHTCPPCPAPELLGGPSVFLFPPKPKDTLMISRTPEVTCVVVDVSHEDPEVKFNWYVDGVEVHNAKTKPREEQYNSTYRVVSVLTVLHQDWLNGKEYKCKVSNKADPAPEEKTISKAKGQPREPQVYTLPPSRDELTKNQVSLTCLVKGFYPSDIAVEWESNGQPENNYKTTPPVLDSDGSFFLYSKLTVDKSRWQQGNVFSCSVMHEALHNHYTQKSLSLSPGK

SEQ ID NO: 583 - protein, 248 aa, Artificial
  Synthetic
CNVNHKPSNTKVDKKVEPKSCDKTHTCPPCPAPELLGGPSVFLFPPKPKDTLMISRTPEVTCVVVDVSHEDPEVKFNWYVDGVEVHNAKTKPREEQYNSTYRVVSVLTVLHQDWLNGKEYKCKVSNKAEPAPEEKTISKAKGQPREPQVYTLPPSRDELTKNQVSLTCLVKGFYPSDIAVEWESNGQPENNYKTTPPVLDSDGSFFLYSKLTVDKSRWQQGNVFSCSVMHEALHNHYTQKSLSLSPGK

SEQ ID NO: 584 - protein, 248 aa, Artificial
  Synthetic
CNVNHKPSNTKVDKKVEPKSCDKTHTCPPCPAPELLGGPSVFLFPPKPKDTLMISRTPEVTCVVVDVSHEDPEVKFNWYVDGVEVHNAKTKPREEQYNSTYRVVSVLTVLHQDWLNGKEYKCKVSNKANPAPEEKTISKAKGQPREPQVYTLPPSRDELTKNQVSLTCLVKGFYPSDIAVEWESNGQPENNYKTTPPVLDSDGSFFLYSKLTVDKSRWQQGNVFSCSVMHEALHNHYTQKSLSLSPGK

SEQ ID NO: 585 - protein, 248 aa, Artificial; identical to SEQ ID NO: 488
  Synthetic

SEQ ID NO: 586 - protein, 248 aa, Artificial
  Synthetic
CNVNHKPSNTKVDKKVEPKSCDKTHTCPPCPAPELLGGPSVFLFPPKPKDTLMISRTPEVTCVVVDVSHEDPEVKFNWYVDGVEVHNAKTKPREEQYNSTYRVVSVLTVLHQDWLNGKEYKCKVSNKAVPAPEEKTISKAKGQPREPQVYTLPPSRDELTKNQVSLTCLVKGFYPSDIAVEWESNGQPENNYKTTPPVLDSDGSFFLYSKLTVDKSRWQQGNVFSCSVMHEALHNHYTQKSLSLSPGK

SEQ ID NO: 587 - protein, 248 aa, Artificial
  Synthetic
CNVNHKPSNTKVDKKVEPKSCDKTHTCPPCPAPELLGGPSVFLFPPKPKDTLMISRTPEVTCVVVDVSHEDPEVKFNWYVDGVEVHNAKTKPREEQYNSTYRVVSVLTVLHQDWLNGKEYKCKVSNKATPAPEEKTISKAKGQPREPQVYTLPPSRDELTKNQVSLTCLVKGFYPSDIAVEWESNGQPENNYKTTPPVLDSDGSFFLYSKLTVDKSRWQQGNVFSCSVMHEALHNHYTQKSLSLSPGK

SEQ ID NO: 588 - protein, 248 aa, Artificial
  Synthetic
CNVNHKPSNTKVDKKVEPKSCDKTHTCPPCPAPELLGGPSVFLFPPKPKDTLMISRTPEVTCVVVDVSHEDPEVKFNWYVDGVEVHNAKTKPREEQYNSTYRVVSVLTVLHQDWLNGKEYKCKVSNKAHPAPEEKTISKAKGQPREPQVYTLPPSRDELTKNQVSLTCLVKGFYPSDIAVEWESNGQPENNYKTTPPVLDSDGSFFLYSKLTVDKSRWQQGNVFSCSVMHEALHNHYTQKSLSLSPGK

SEQ ID NO: 589 - protein, 248 aa, Artificial; identical to SEQ ID NO: 487
  Synthetic

SEQ ID NO: 590 - protein, 248 aa, Artificial
  Synthetic
CNVNHKPSNTKVDKKVEPKSCDKTHTCPPCPAPELLGGPSVFLFPPKPKDTLMISRTPEVTCVVVDVSHEDPEVKFNWYVDGVEVHNAKTKPREEQYNSTYRVVSVLTVLHQDWLNGKEYKCKVSNKAAPAPIEKTISKAKGQPREPQVYTLPPSRDELTKNQVSLTCLVKGFYPSDIAVEWESNGQPENNYKTTPPVLDSDGSFFLYSKLTVDKSRWQQGNVFSCSVMHEALHNHYTQKSLSLSPGK

SEQ ID NO: 591 - protein, 248 aa, Artificial
  Synthetic
CNVNHKPSNTKVDKKVEPKSCDKTHTCPPCPAPELLGGPSVFLFPPKPKDTLMISRTPEVTCVVVDVSHEDPEVKFNWYVDGVEVHNAKTKPREEQYNSTYRVVSVLTVLHQDWLNGKEYKCKVSNKALPAPTEKTISKAKGQPREPQVYTLPPSRDELTKNQVSLTCLVKGFYPSDIAVEWESNGQPENNYKTTPPVLDSDGSFFLYSKLTVDKSRWQQGNVFSCSVMHEALHNHYTQKSLSLSPGK

SEQ ID NO: 592 - protein, 248 aa, Artificial
  Synthetic
CNVNHKPSNTKVDKKVEPKSCDKTHTCPPCPAPELLGGPSVFLFPPKPKDTLMISRTPEVTCVVVDVSHEDPEVKFNWYVDGVEVHNAKTKPREEQYNSTYRVVSVLTVLHQDWLNGKEYKCKVSNKALPAPHEKTISKAKGQPREPQVYTLPPSRDELTKNQVSLTCLVKGFYPSDIAVEWESNGQPENNYKTTPPVLDSDGSFFLYSKLTVDKSRWQQGNVFSCSVMHEALHNHYTQKSLSLSPGK

SEQ ID NO: 593 - protein, 248 aa, Artificial
  Synthetic
CNVNHKPSNTKVDKKVEPKSCDKTHTCPPCPAPELLGGPSVFLFPPKPKDTLMISRTPEVTCVVVDVSHEDPEVKFNWYVDGVEVHNAKTKPREEQYNSTYRVVSVLTVLHQDWLNGKEYKCKVSNKALPAPYEKTISKAKGQPREPQVYTLPPSRDELTKNQVSLTCLVKGFYPSDIAVEWESNGQPENNYKTTPPVLDSDGSFFLYSKLTVDKSRWQQGNVFSCSVMHEALHNHYTQKSLSLSPGK

SEQ ID NO: 594 - protein, 248 aa, Artificial
  Synthetic
CNVNHKPSNTKVDKKVEPKSCDKTHTCPPCPAPELLGGPSVFLFPPKPKDTLMISRTPEVTCVVVDVSHEDPEVKFNWYVDGVEVHNAKTKPREEQYNSTYRVVSVLTVLHQDWLNGKEYKCKVSNKALPAPAEKTISKAKGQPREPQVYTLPPSRDELTKNQVSLTCLVKGFYPSDIAVEWESNGQPENNYKTTPPVLDSDGSFFLYSKLTVDKSRWQQGNVFSCSVMHEALHNHYTQKSLSLSPGK

SEQ ID NO: 595 - protein, 248 aa, Artificial
  Synthetic
CNVNHKPSNTKVDKKVEPKSCDKTHTCPPCPAPELLGGPEVFLFPPKPKDTLMISRTPEVTCVVIDVSHEDPEVKFNWYVDGVEVHNAKTKPREEQYNSTYRVVSVLTVLHQDWLNGKEYKCKVSNKALPAPEEKTISKAKGQPREPQVYTLPPSRDELTKNQVSLTCLVKGFYPSDIAVEWESNGQPENNYKTTPPVLDSDGSFFLYSKLTVDKSRWQQGNVFSCSVMHEALHNHYTQKSLSLSPGK

SEQ ID NO: 596 - protein, 248 aa, Artificial
  Synthetic
CNVNHKPSNTKVDKKVEPKSCDKTHTCPPCPAPELLGGPQVFLFPPKPKDTLMISRTPEVTCVVIDVSHEDPEVKFNWYVDGVEVHNAKTKPREEQYNSTYRVVSVLTVLHQDWLNGKEYKCKVSNKALPAPEEKTISKAKGQPREPQVYTLPPSRDELTKNQVSLTCLVKGFYPSDIAVEWESNGQPENNYKTTPPVLDSDGSFFLYSKLTVDKSRWQQGNVFSCSVMHEALHNHYTQKSLSLSPGK

SEQ ID NO: 597 - protein, 248 aa, Artificial
  Synthetic
CNVNHKPSNTKVDKKVEPKSCDKTHTCPPCPAPELLGGPEVFLFPPKPKDTLMISRTPEVTCVVIDVSHEDPEVKFNWYVDGVEVHNAKTKPREEQYNSTYRVVSVLTVLHQDWLNGKEYKCKVSNKALPYPEEKTISKAKGQPREPQVYTLPPSRDELTKNQVSLTCLVKGFYPSDIAVEWESNGQPENNYKTTPPVLDSDGSFFLYSKLTVDKSRWQQGNVFSCSVMHEALHNHYTQKSLSLSPGK

SEQ ID NO: 598 - protein, 248 aa, Artificial
  Synthetic
CNVNHKPSNTKVDKKVEPKSCDKTHTCPPCPAPELLGGPEVFLFPPKPKDTLMISRTPEVTCVVIDVSHEDPEVKFNWYVDGVEVHNAKTKPREEQYNATYRVVSVLTVLHQDWLNGKEYKCKVSNKALPYPEEKTISKAKGQPREPQVYTLPPSRDELTKNQVSLTCLVKGFYPSDIAVEWESNGQPENNYKTTPPVLDSDGSFFLYSKLTVDKSRWQQGNVFSCSVMHEALHNHYTQKSLSLSPGK

SEQ ID NO: 599 - protein, 248 aa, Artificial
  Synthetic
CNVNHKPSNTKVDKKVEPKSCDKTHTCPPCPAPELLGGPDVFLFPPKPKDTLMISRTPEVTCVVVDVSHEDPEVKFNWYVDGVEVHNAKTKPREEQYDSTYRVVSVLTVLHQDWLNGKEYKCKVSNKALPAPEEKTISKAKGQPREPQVYTLPPSRDELTKNQVSLTCLVKGFYPSDIAVEWESNGQPENNYKTTPPVLDSDGSFFLYSKLTVDKSRWQQGNVFSCSVMHEALHNHYTQKSLSLSPGK

SEQ ID NO: 600 - protein, 248 aa, Artificial
  Synthetic
CNVNHKPSNTKVDKKVEPKSCDKTHTCPPCPAPELLGGPEVFLFPPKPKDTLMISRTPEVTCVVVDVSHEDPEVKFNWYVDGVEVHNAKTKPREEQYDSTYRVVSVLTVLHQDWLNGKEYKCKVSNKALPAPEEKTISKAKGQPREPQVYTLPPSRDELTKNQVSLTCLVKGFYPSDIAVEWESNGQPENNYKTTPPVLDSDGSFFLYSKLTVDKSRWQQGNVFSCSVMHEALHNHYTQKSLSLSPGK

SEQ ID NO: 601 - protein, 248 aa, Artificial
  Synthetic
CNVNHKPSNTKVDKKVEPKSCDKTHTCPPCPAPELLGGPDVFLFPPKPKDTLMISRTPEVTCVVVVVSHEDPEVKFNWYVDGVEVHNAKTKPREEQYDSTYRVVSVLTVLHQDWLNGKEYKCKVSNKALPAPEEKTISKAKGQPREPQVYTLPPSRDELTKNQVSLTCLVKGFYPSDIAVEWESNGQPENNYKTTPPVLDSDGSFFLYSKLTVDKSRWQQGNVFSCSVMHEALHNHYTQKSLSLSPGK

SEQ ID NO: 602 - protein, 248 aa, Artificial
  Synthetic
CNVNHKPSNTKVDKKVEPKSCDKTHTCPPCPAPELLGGPDVFLFPPKPKDTLMISRTPEVTCVVVIVSHEDPEVKFNWYVDGVEVHNAKTKPREEQYDSTYRVVSVLTVLHQDWLNGKEYKCKVSNKALPAPEEKTISKAKGQPREPQVYTLPPSRDELTKNQVSLTCLVKGFYPSDIAVEWESNGQPENNYKTTPPVLDSDGSFFLYSKLTVDKSRWQQGNVFSCSVMHEALHNHYTQKSLSLSPGK

SEQ ID NO: 603 - protein, 248 aa, Artificial
  Synthetic
CNVNHKPSNTKVDKKVEPKSCDKTHTCPPCPAPELLGGPDVFLFPPKPKDTLMISRTPEVTCVVVLVSHEDPEVKFNWYVDGVEVHNAKTKPREEQYDSTYRVVSVLTVLHQDWLNGKEYKCKVSNKALPAPEEKTISKAKGQPREPQVYTLPPSRDELTKNQVSLTCLVKGFYPSDIAVEWESNGQPENNYKTTPPVLDSDGSFFLYSKLTVDKSRWQQGNVFSCSVMHEALHNHYTQKSLSLSPGK

SEQ ID NO: 604 - protein, 248 aa, Artificial
  Synthetic
CNVNHKPSNTKVDKKVEPKSCDKTHTCPPCPAPELLGGPDVFLFPPKPKDTLMISRTPEVTCVVVFVSHEDPEVKFNWYVDGVEVHNAKTKPREEQYDSTYRVVSVLTVLHQDWLNGKEYKCKVSNKALPAPEEKTISKAKGQPREPQVYTLPPSRDELTKNQVSLTCLVKGFYPSDIAVEWESNGQPENNYKTTPPVLDSDGSFFLYSKLTVDKSRWQQGNVFSCSVMHEALHNHYTQKSLSLSPGK

SEQ ID NO: 605 - protein, 248 aa, Artificial
  Synthetic
CNVNHKPSNTKVDKKVEPKSCDKTHTCPPCPAPELLGGPDVFLFPPKPKDTLMISRTPEVTCVVVYVSHEDPEVKFNWYVDGVEVHNAKTKPREEQYDSTYRVVSVLTVLHQDWLNGKEYKCKVSNKALPAPEEKTISKAKGQPREPQVYTLPPSRDELTKNQVSLTCLVKGFYPSDIAVEWESNGQPENNYKTTPPVLDSDGSFFLYSKLTVDKSRWQQGNVFSCSVMHEALHNHYTQKSLSLSPGK

SEQ ID NO: 606 - protein, 248 aa, Artificial
  Synthetic
CNVNHKPSNTKVDKKVEPKSCDKTHTCPPCPAPELLGGPDVFLFPPKPKDTLMISRTPEVTCVVVHVSHEDPEVKFNWYVDGVEVHNAKTKPREEQYDSTYRVVSVLTVLHQDWLNGKEYKCKVSNKALPAPEEKTISKAKGQPREPQVYTLPPSRDELTKNQVSLTCLVKGFYPSDIAVEWESNGQPENNYKTTPPVLDSDGSFFLYSKLTVDKSRWQQGNVFSCSVMHEALHNHYTQKSLSLSPGK

SEQ ID NO: 607 - protein, 248 aa, Artificial
  Synthetic
CNVNHKPSNTKVDKKVEPKSCDKTHTCPPCPAPELLGGPDVFLFPPKPKDTLMISRTPEVTCVVVTVSHEDPEVKFNWYVDGVEVHNAKTKPREEQYDSTYRVVSVLTVLHQDWLNGKEYKCKVSNKALPAPEEKTISKAKGQPREPQVYTLPPSRDELTKNQVSLTCLVKGFYPSDIAVEWESNGQPENNYKTTPPVLDSDGSFFLYSKLTVDKSRWQQGNVFSCSVMHEALHNHYTQKSLSLSPGK

SEQ ID NO: 608 - protein, 248 aa, Artificial
  Synthetic
CNVNHKPSNTKVDKKVEPKSCDKTHTCPPCPAPELLGGPSVFLFPPKPKDTLMISRTPEVTCVVEDVSHEDPEVKFNWYVDGVEVHNAKTKPREEQYDSTYRVVSVLTVLHQDWLNGKEYKCKVSNKALPAPEEKTISKAKGQPREPQVYTLPPSRDELTKNQVSLTCLVKGFYPSDIAVEWESNGQPENNYKTTPPVLDSDGSFFLYSKLTVDKSRWQQGNVFSCSVMHEALHNHYTQKSLSLSPGK

SEQ ID NO: 609 - protein, 248 aa, Artificial
  Synthetic
CNVNHKPSNTKVDKKVEPKSCDKTHTCPPCPAPELLGGPSVFLFPPKPKDTLMISRTPEVTCVVVDVSHEDPEVKFNWYVDGVEVHNAKTKPREEQDDSTYRVVSVLTVLHQDWLNGKEYKCKVSNKALPAPEEKTISKAKGQPREPQVYTLPPSRDELTKNQVSLTCLVKGFYPSDIAVEWESNGQPENNYKTTPPVLDSDGSFFLYSKLTVDKSRWQQGNVFSCSVMHEALHNHYTQKSLSLSPGK

SEQ ID NO: 610 - protein, 248 aa, Artificial
  Synthetic
CNVNHKPSNTKVDKKVEPKSCDKTHTCPPCPAPELLGGPSVFLFPPKPKDTLMISRTPEVTCVVVDVSHEDPEVKFNWYVDGVEVHNAKTKPREEQEDSTYRVVSVLTVLHQDWLNGKEYKCKVSNKALPAPEEKTISKAKGQPREPQVYTLPPSRDELTKNQVSLTCLVKGFYPSDIAVEWESNGQPENNYKTTPPVLDSDGSFFLYSKLTVDKSRWQQGNVFSCSVMHEALHNHYTQKSLSLSPGK

SEQ ID NO: 611 - protein, 248 aa, Artificial
  Synthetic
CNVNHKPSNTKVDKKVEPKSCDKTHTCPPCPAPELLGGPSVFLFPPKPKDTLMISRTPEVTCVVVDVSHEDPEVKFNWYVDGVEVHNAKTKPREEQNDSTYRVVSVLTVLHQDWLNGKEYKCKVSNKALPAPEEKTISKAKGQPREPQVYTLPPSRDELTKNQVSLTCLVKGFYPSDIAVEWESNGQPENNYKTTPPVLDSDGSFFLYSKLTVDKSRWQQGNVFSCSVMHEALHNHYTQKSLSLSPGK

SEQ ID NO: 612 - protein, 248 aa, Artificial
  Synthetic
CNVNHKPSNTKVDKKVEPKSCDKTHTCPPCPAPELLGGPSVFLFPPKPKDTLMISRTPEVTCVVVDVSHEDPEVKFNWYVDGVEVHNAKTKPREEQQDSTYRVVSVLTVLHQDWLNGKEYKCKVSNKALPAPEEKTISKAKGQPREPQVYTLPPSRDELTKNQVSLTCLVKGFYPSDIAVEWESNGQPENNYKTTPPVLDSDGSFFLYSKLTVDKSRWQQGNVFSCSVMHEALHNHYTQKSLSLSPGK

SEQ ID NO: 613 - protein, 248 aa, Artificial
  Synthetic
CNVNHKPSNTKVDKKVEPKSCDKTHTCPPCPAPELLGGPSVFLFPPKPKDTLMISRTPEVTCVVVDVSHEDPEVKFNWYVDGVEVHNAKTKPREEQHDSTYRVVSVLTVLHQDWLNGKEYKCKVSNKALPAPEEKTISKAKGQPREPQVYTLPPSRDELTKNQVSLTCLVKGFYPSDIAVEWESNGQPENNYKTTPPVLDSDGSFFLYSKLTVDKSRWQQGNVFSCSVMHEALHNHYTQKSLSLSPGK

SEQ ID NO: 614 - protein, 248 aa, Artificial
  Synthetic
CNVNHKPSNTKVDKKVEPKSCDKTHTCPPCPAPELLGGPSVFLFPPKPKDTLMISRTPEVTCVVVDVSHEDPEVKFNWYVDGVEVHNAKTKPREEQTDSTYRVVSVLTVLHQDWLNGKEYKCKVSNKALPAPEEKTISKAKGQPREPQVYTLPPSRDELTKNQVSLTCLVKGFYPSDIAVEWESNGQPENNYKTTPPVLDSDGSFFLYSKLTVDKSRWQQGNVFSCSVMHEALHNHYTQKSLSLSPGK

SEQ ID NO: 615 - protein, 248 aa, Artificial
  Synthetic
CNVNHKPSNTKVDKKVEPKSCDKTHTCPPCPAPELLGGPSVFLFPPKPKDTLMISRTPEVTCVVVDVSHEDPEVKFNWYVDGVEVHNAKTKPREEQYDSVYRVVSVLTVLHQDWLNGKEYKCKVSNKALPAPEEKTISKAKGQPREPQVYTLPPSRDELTKNQVSLTCLVKGFYPSDIAVEWESNGQPENNYKTTPPVLDSDGSFFLYSKLTVDKSRWQQGNVFSCSVMHEALHNHYTQKSLSLSPGK

SEQ ID NO: 616 - protein, 248 aa, Artificial
  Synthetic
CNVNHKPSNTKVDKKVEPKSCDKTHTCPPCPAPELLGGPSVFLFPPKPKDTLMISRTPEVTCVVVDVSHEDPEVKFNWYVDGVEVHNAKTKPREEQYDSIYRVVSVLTVLHQDWLNGKEYKCKVSNKALPAPEEKTISKAKGQPREPQVYTLPPSRDELTKNQVSLTCLVKGFYPSDIAVEWESNGQPENNYKTTPPVLDSDGSFFLYSKLTVDKSRWQQGNVFSCSVMHEALHNHYTQKSLSLSPGK

SEQ ID NO: 617 - protein, 248 aa, Artificial
  Synthetic
CNVNHKPSNTKVDKKVEPKSCDKTHTCPPCPAPELLGGPSVFLFPPKPKDTLMISRTPEVTCVVVDVSHEDPEVKFNWYVDGVEVHNAKTKPREEQYDSLYRVVSVLTVLHQDWLNGKEYKCKVSNKALPAPEEKTISKAKGQPREPQVYTLPPSRDELTKNQVSLTCLVKGFYPSDIAVEWESNGQPENNYKTTPPVLDSDGSFFLYSKLTVDKSRWQQGNVFSCSVMHEALHNHYTQKSLSLSPGK

SEQ ID NO: 618 - protein, 248 aa, Artificial
  Synthetic
CNVNHKPSNTKVDKKVEPKSCDKTHTCPPCPAPELLGGPSVFLFPPKPKDTLMISRTPEVTCVVVDVSHEDPEVKFNWYVDGVEVHNAKTKPREEQYDSFYRVVSVLTVLHQDWLNGKEYKCKVSNKALPAPEEKTISKAKGQPREPQVYTLPPSRDELTKNQVSLTCLVKGFYPSDIAVEWESNGQPENNYKTTPPVLDSDGSFFLYSKLTVDKSRWQQGNVFSCSVMHEALHNHYTQKSLSLSPGK

SEQ ID NO: 619 - protein, 248 aa, Artificial
  Synthetic
CNVNHKPSNTKVDKKVEPKSCDKTHTCPPCPAPELLGGPSVFLFPPKPKDTLMISRTPEVTCVVVDVSHEDPEVKFNWYVDGVEVHNAKTKPREEQYDSHYRVVSVLTVLHQDWLNGKEYKCKVSNKALPAPEEKTISKAKGQPREPQVYTLPPSRDELTKNQVSLTCLVKGFYPSDIAVEWESNGQPENNYKTTPPVLDSDGSFFLYSKLTVDKSRWQQGNVFSCSVMHEALHNHYTQKSLSLSPGK

SEQ ID NO: 620 - protein, 248 aa, Artificial
  Synthetic
CNVNHKPSNTKVDKKVEPKSCDKTHTCPPCPAPELLGGPSVFLFPPKPKDTLMISRTPEVTCVVVDVSHEDPEVKFNWYVDGVEVHNAKTKPREEQYDSEYRVVSVLTVLHQDWLNGKEYKCKVSNKALPAPEEKTISKAKGQPREPQVYTLPPSRDELTKNQVSLTCLVKGFYPSDIAVEWESNGQPENNYKTTPPVLDSDGSFFLYSKLTVDKSRWQQGNVFSCSVMHEALHNHYTQKSLSLSPGK

SEQ ID NO: 621 - protein, 248 aa, Artificial
  Synthetic
CNVNHKPSNTKVDKKVEPKSCDKTHTCPPCPAPELLGGPSVFLFPPKPKDTLMISRTPEVTCVVVDVSHEDPEVKFNWYVDGVEVHNAKTKPREEQYDSTYRVVSVLTVLHQDWLNGKEYKCKVSNKALPYPEEKTISKAKGQPREPQVYTLPPSRDELTKNQVSLTCLVKGFYPSDIAVEWESNGQPENNYKTTPPVLDSDGSFFLYSKLTVDKSRWQQGNVFSCSVMHEALHNHYTQKSLSLSPGK

SEQ ID NO: 622 - protein, 248 aa, Artificial
  Synthetic
CNVNHKPSNTKVDKKVEPKSCDKTHTCPPCPAPELLGGPSVFLFPPKPKDTLMISRTPEVTCVVVDVSHEDPEVKFNWYVDGVEVHNAKTKPREEQYDATYRVVSVLTVLHQDWLNGKEYKCKVSNKALPYPEEKTISKAKGQPREPQVYTLPPSRDELTKNQVSLTCLVKGFYPSDIAVEWESNGQPENNYKTTPPVLDSDGSFFLYSKLTVDKSRWQQGNVFSCSVMHEALHNHYTQKSLSLSPGK

SEQ ID NO: 623 - protein, 248 aa, Artificial
  Synthetic
CNVNHKPSNTKVDKKVEPKSCDKTHTCPPCPAPELLGGPDVFLFPPKPKDTLMISRTPEVTCVVVDVSHEDPEVKFNWYVDGVEVHNAKTKPREEQYNSTYRVVSVLTVLHQDWLNGKEYKCKVSNKALPYPEEKTISKAKGQPREPQVYTLPPSRDELTKNQVSLTCLVKGFYPSDIAVEWESNGQPENNYKTTPPVLDSDGSFFLYSKLTVDKSRWQQGNVFSCSVMHEALHNHYTQKSLSLSPGK

SEQ ID NO: 624 - protein, 248 aa, Artificial
  Synthetic
CNVNHKPSNTKVDKKVEPKSCDKTHTCPPCPAPELLGGPNVFLFPPKPKDTLMISRTPEVTCVVVDVSHEDPEVKFNWYVDGVEVHNAKTKPREEQYNSTYRVVSVLTVLHQDWLNGKEYKCKVSNKALPYPEEKTISKAKGQPREPQVYTLPPSRDELTKNQVSLTCLVKGFYPSDIAVEWESNGQPENNYKTTPPVLDSDGSFFLYSKLTVDKSRWQQGNVFSCSVMHEALHNHYTQKSLSLSPGK

SEQ ID NO: 625 - protein, 248 aa, Artificial; identical to SEQ ID NO: 623
  Synthetic

SEQ ID NO: 626 - protein, 248 aa, Artificial; identical to SEQ ID NO: 503
  Synthetic

SEQ ID NO: 627 - protein, 248 aa, Artificial
  Synthetic
CNVNHKPSNTKVDKKVEPKSCDKTHTCPPCPAPELLGGPSVFLFPPKPKDTLMISRTPEVTCVVIDVSHEDPEVKFNWYVDGVEVHNAKTKPREEQYNATYRVVSVLTVLHQDWLNGKEYKCKVSNKALPAPEEKTISKAKGQPREPQVYTLPPSRDELTKNQVSLTCLVKGFYPSDIAVEWESNGQPENNYKTTPPVLDSDGSFFLYSKLTVDKSRWQQGNVFSCSVMHEALHNHYTQKSLSLSPGK

SEQ ID NO: 628 - protein, 248 aa, Artificial
  Synthetic
CNVNHKPSNTKVDKKVEPKSCDKTHTCPPCPAPELLGGPDVFLFPPKPKDTLMISRTPEVTCVVVDVSHEDPEVKFNWYVDGVEVHNAKTKPREEQYNATYRVVSVLTVLHQDWLNGKEYKCKVSNKALPAPEEKTISKAKGQPREPQVYTLPPSRDELTKNQVSLTCLVKGFYPSDIAVEWESNGQPENNYKTTPPVLDSDGSFFLYSKLTVDKSRWQQGNVFSCSVMHEALHNHYTQKSLSLSPGK

SEQ ID NO: 629 - protein, 248 aa, Artificial
  Synthetic
CNVNHKPSNTKVDKKVEPKSCDKTHTCPPCPAPELLGGPNVFLFPPKPKDTLMISRTPEVTCVVVDVSHEDPEVKFNWYVDGVEVHNAKTKPREEQYNATYRVVSVLTVLHQDWLNGKEYKCKVSNKALPAPEEKTISKAKGQPREPQVYTLPPSRDELTKNQVSLTCLVKGFYPSDIAVEWESNGQPENNYKTTPPVLDSDGSFFLYSKLTVDKSRWQQGNVFSCSVMHEALHNHYTQKSLSLSPGK

SEQ ID NO: 630 - protein, 248 aa, Artificial
  Synthetic
CNVNHKPSNTKVDKKVEPKSCDKTHTCPPCPAPELLGGPDVFLFPPKPKDTLMISRTPEVTCVVIDVSHEDPEVKFNWYVDGVEVHNAKTKPREEQYNSTYRVVSVLTVLHQDWLNGKEYKCKVSNKALPAPEEKTISKAKGQPREPQVYTLPPSRDELTKNQVSLTCLVKGFYPSDIAVEWESNGQPENNYKTTPPVLDSDGSFFLYSKLTVDKSRWQQGNVFSCSVMHEALHNHYTQKSLSLSPGK

SEQ ID NO: 631 - protein, 248 aa, Artificial
  Synthetic
CNVNHKPSNTKVDKKVEPKSCDKTHTCPPCPAPELLGGPDVFLFPPKPKDTLMISRTPEVTCVVIDVSHEDPEVKFNWYVDGVEVHNAKTKPREEQYNATYRVVSVLTVLHQDWLNGKEYKCKVSNKALPAPEEKTISKAKGQPREPQVYTLPPSRDELTKNQVSLTCLVKGFYPSDIAVEWESNGQPENNYKTTPPVLDSDGSFFLYSKLTVDKSRWQQGNVFSCSVMHEALHNHYTQKSLSLSPGK

SEQ ID NO: 632 - protein, 248 aa, Artificial
  Synthetic
CNVNHKPSNTKVDKKVEPKSCDKTHTCPPCPAPELLGGPDVFLFPPKPKDTLMISRTPEVTCVVIDVSHEDPEVKFNWYVDGVEVHNAKTKPREEQYNSTYRVVSVLTVLHQDWLNGKEYKCKVSNKALPLPEEKTISKAKGQPREPQVYTLPPSRDELTKNQVSLTCLVKGFYPSDIAVEWESNGQPENNYKTTPPVLDSDGSFFLYSKLTVDKSRWQQGNVFSCSVMHEALHNHYTQKSLSLSPGK

SEQ ID NO: 633 - protein, 248 aa, Artificial
  Synthetic
CNVNHKPSNTKVDKKVEPKSCDKTHTCPPCPAPELLGGPSVFLFPPKPKDTLMISRTPEVTCVVVDVSHEDPEVKFNWYVDGVEVHNAKTKPREEQYNSTYRVVSVLTVLHQDWLNGKEYKCKVSNKANPAPIEKTISKAKGQPREPQVYTLPPSRDELTKNQVSLTCLVKGFYPSDIAVEWESNGQPENNYKTTPPVLDSDGSFFLYSKLTVDKSRWQQGNVFSCSVMHEALHNHYTQKSLSLSPGK

SEQ ID NO: 634 - protein, 248 aa, Artificial
  Synthetic
CNVNHKPSNTKVDKKVEPKSCDKTHTCPPCPAPELLGGPSVFLFPPKPKDTLMISRTPEVTCVVVDVSHEDPEVKFNWYVDGVEVHNAKTKPREEQYNSTYRVVSVLTVLHQDWLNGKEYKCKVSNKAHPAPIEKTISKAKGQPREPQVYTLPPSRDELTKNQVSLTCLVKGFYPSDIAVEWESNGQPENNYKTTPPVLDSDGSFFLYSKLTVDKSRWQQGNVFSCSVMHEALHNHYTQKSLSLSPGK

SEQ ID NO: 635 - protein, 248 aa, Artificial
  Synthetic
CNVNHKPSNTKVDKKVEPKSCDKTHTCPPCPAPELLGGPDVFLFPPKPKDTLMISRTPEVTCVVVDVSHEDPEVKFNWYVDGVEVHNAKTKPREEQYNSTYRVVSVLTVLHQDWLNGKEYKCKVSNKALPIPEEKTISKAKGQPREPQVYTLPPSRDELTKNQVSLTCLVKGFYPSDIAVEWESNGQPENNYKTTPPVLDSDGSFFLYSKLTVDKSRWQQGNVFSCSVMHEALHNHYTQKSLSLSPGK

SEQ ID NO: 636 - protein, 248 aa, Artificial
  Synthetic
CNVNHKPSNTKVDKKVEPKSCDKTHTCPPCPAPELLGGPDVFLFPPKPKDTLMISRTPEVTCVVVDVSHEDPEVKFNWYVDGVEVHNAKTKPREEQYDSTYRVVSVLTVLHQDWLNGKEYKCKVSNKALPLPEEKTISKAKGQPREPQVYTLPPSRDELTKNQVSLTCLVKGFYPSDIAVEWESNGQPENNYKTTPPVLDSDGSFFLYSKLTVDKSRWQQGNVFSCSVMHEALHNHYTQKSLSLSPGK

SEQ ID NO: 637 - protein, 248 aa, Artificial
  Synthetic
CNVNHKPSNTKVDKKVEPKSCDKTHTCPPCAAPELLGGPSVFLFPPKPKDTLMISRTPEVTCVVVDVSHEDPEVKFNWYVDGVEVHNAKTKPREEQYNSTYRVVSVLTVLHQDWLNGKEYKCKVSNKALPAPIEKTISKAKGQPREPQVYTLPPSRDELTKNQVSLTCLVKGFYPSDIAVEWESNGQPENNYKTTPPVLDSDGSFFLYSKLTVDKSRWQQGNVFSCSVMHEALHNHYTQKSLSLSPGK

SEQ ID NO: 638 - protein, 248 aa, Artificial
  Synthetic
CNVNHKPSNTKVDKKVEPKSCDKTHTCPPCPAPDLLGGPSVFLFPPKPKDTLMISRTPEVTCVVVDVSHEDPEVKFNWYVDGVEVHNAKTKPREEQYNSTYRVVSVLTVLHQDWLNGKEYKCKVSNKALPAPIEKTISKAKGQPREPQVYTLPPSRDELTKNQVSLTCLVKGFYPSDIAVEWESNGQPENNYKTTPPVLDSDGSFFLYSKLTVDKSRWQQGNVFSCSVMHEALHNHYTQKSLSLSPGK

SEQ ID NO: 639 - protein, 248 aa, Artificial
  Synthetic
CNVNHKPSNTKVDKKVEPKSCDKTHTCPPCAAPDLLGGPSVFLFPPKPKDTLMISRTPEVTCVVVDVSHEDPEVKFNWYVDGVEVHNAKTKPREEQYNSTYRVVSVLTVLHQDWLNGKEYKCKVSNKALPAPIEKTISKAKGQPREPQVYTLPPSRDELTKNQVSLTCLVKGFYPSDIAVEWESNGQPENNYKTTPPVLDSDGSFFLYSKLTVDKSRWQQGNVFSCSVMHEALHNHYTQKSLSLSPGK

SEQ ID NO: 640 - protein, 248 aa, Artificial
  Synthetic
CNVNHKPSNTKVDKKVEPKSCDKTHTCPPCAAPDLLGGPSVFLFPPKPKDTLMISRTPEVTCVVVDVSHEDPEVKFNWYVDGVEVHNAKTKPREEQYNSTYRVVSVLTVLHQDWLNGKEYKCKVSNKALPAPEEKTISKAKGQPREPQVYTLPPSRDELTKNQVSLTCLVKGFYPSDIAVEWESNGQPENNYKTTPPVLDSDGSFFLYSKLTVDKSRWQQGNVFSCSVMHEALHNHYTQKSLSLSPGK

SEQ ID NO: 641 - protein, 248 aa, Artificial
  Synthetic
CNVNHKPSNTKVDKKVEPKSCDKTHTCPPCPAPELLGGPSVFLFPPKPKDTLMISRTPEVTCVVVDVTHEDPEVKFNWYVDGVEVHNAKTKPREEQYNSTYRVVSVLTVLHQDWLNGKEYKCKVSNKALPAPIEKTISKAKGQPREPQVYTLPPSRDELTKNQVSLTCLVKGFYPSDIAVEWESNGQPENNYKTTPPVLDSDGSFFLYSKLTVDKSRWQQGNVFSCSVMHEALHNHYTQKSLSLSPGK

SEQ ID NO: 642 - protein, 248 aa, Artificial
  Synthetic
CNVNHKPSNTKVDKKVEPKSCDKTHTCPPCPAPELLGGPSVFLFPPKPKDTLMISRTPEVTCVVVDVHHEDPEVKFNWYVDGVEVHNAKTKPREEQYNSTYRVVSVLTVLHQDWLNGKEYKCKVSNKALPAPIEKTISKAKGQPREPQVYTLPPSRDELTKNQVSLTCLVKGFYPSDIAVEWESNGQPENNYKTTPPVLDSDGSFFLYSKLTVDKSRWQQGNVFSCSVMHEALHNHYTQKSLSLSPGK

SEQ ID NO: 643 - protein, 248 aa, Artificial
  Synthetic
CNVNHKPSNTKVDKKVEPKSCDKTHTCPPCPAPELLGGPSVFLFPPKPKDTLMISRTPEVTCVVVDVDHEDPEVKFNWYVDGVEVHNAKTKPREEQYNSTYRVVSVLTVLHQDWLNGKEYKCKVSNKALPAPIEKTISKAKGQPREPQVYTLPPSRDELTKNQVSLTCLVKGFYPSDIAVEWESNGQPENNYKTTPPVLDSDGSFFLYSKLTVDKSRWQQGNVFSCSVMHEALHNHYTQKSLSLSPGK

SEQ ID NO: 644 - protein, 248 aa, Artificial
  Synthetic
CNVNHKPSNTKVDKKVEPKSCDKTHTCPPCPAPELLGGPSVFLFPPKPKDTLMISRTPEVTCVVVDVNHEDPEVKFNWYVDGVEVHNAKTKPREEQYNSTYRVVSVLTVLHQDWLNGKEYKCKVSNKALPAPIEKTISKAKGQPREPQVYTLPPSRDELTKNQVSLTCLVKGFYPSDIAVEWESNGQPENNYKTTPPVLDSDGSFFLYSKLTVDKSRWQQGNVFSCSVMHEALHNHYTQKSLSLSPGK

SEQ ID NO: 645 - protein, 248 aa, Artificial
  Synthetic
CNVNHKPSNTKVDKKVEPKSCDKTHTCPPCPAPELLGGPSVFLFPPKPKDTLMISRTPEVTCVVVDVSHTDPEVKFNWYVDGVEVHNAKTKPREEQYNSTYRVVSVLTVLHQDWLNGKEYKCKVSNKALPAPIEKTISKAKGQPREPQVYTLPPSRDELTKNQVSLTCLVKGFYPSDIAVEWESNGQPENNYKTTPPVLDSDGSFFLYSKLTVDKSRWQQGNVFSCSVMHEALHNHYTQKSLSLSPGK

SEQ ID NO: 646 - protein, 248 aa, Artificial
  Synthetic
CNVNHKPSNTKVDKKVEPKSCDKTHTCPPCPAPELLGGPSVFLFPPKPKDTLMISRTPEVTCVVVDVSHLDPEVKFNWYVDGVEVHNAKTKPREEQYNSTYRVVSVLTVLHQDWLNGKEYKCKVSNKALPAPIEKTISKAKGQPREPQVYTLPPSRDELTKNQVSLTCLVKGFYPSDIAVEWESNGQPENNYKTTPPVLDSDGSFFLYSKLTVDKSRWQQGNVFSCSVMHEALHNHYTQKSLSLSPGK

SEQ ID NO: 647 - protein, 248 aa, Artificial
  Synthetic
CNVNHKPSNTKVDKKVEPKSCDKTHTCPPCPAPELLGGPSVFLFPPKPKDTLMISRTPEVTCVVVDVSHNDPEVKFNWYVDGVEVHNAKTKPREEQYNSTYRVVSVLTVLHQDWLNGKEYKCKVSNKALPAPIEKTISKAKGQPREPQVYTLPPSRDELTKNQVSLTCLVKGFYPSDIAVEWESNGQPENNYKTTPPVLDSDGSFFLYSKLTVDKSRWQQGNVFSCSVMHEALHNHYTQKSLSLSPGK

SEQ ID NO: 648 - protein, 248 aa, Artificial
  Synthetic
CNVNHKPSNTKVDKKVEPKSCDKTHTCPPCPAPELLGGPSVFLFPPKPKDTLMISRTPEVTCVVVDVSHEQPEVKFNWYVDGVEVHNAKTKPREEQYNSTYRVVSVLTVLHQDWLNGKEYKCKVSNKALPAPIEKTISKAKGQPREPQVYTLPPSRDELTKNQVSLTCLVKGFYPSDIAVEWESNGQPENNYKTTPPVLDSDGSFFLYSKLTVDKSRWQQGNVFSCSVMHEALHNHYTQKSLSLSPGK

SEQ ID NO: 649 - protein, 248 aa, Artificial
  Synthetic
CNVNHKPSNTKVDKKVEPKSCDKTHTCPPCPAPELLGGPSVFLFPPKPKDTLMISRTPEVTCVVVDVSHETPEVKFNWYVDGVEVHNAKTKPREEQYNSTYRVVSVLTVLHQDWLNGKEYKCKVSNKALPAPIEKTISKAKGQPREPQVYTLPPSRDELTKNQVSLTCLVKGFYPSDIAVEWESNGQPENNYKTTPPVLDSDGSFFLYSKLTVDKSRWQQGNVFSCSVMHEALHNHYTQKSLSLSPGK

SEQ ID NO: 650 - protein, 248 aa, Artificial
  Synthetic
CNVNHKPSNTKVDKKVEPKSCDKTHTCPPCPAPELLGGPSVFLFPPKPKDTLMISRTPEVTCVVVDVSHEHPEVKFNWYVDGVEVHNAKTKPREEQYNSTYRVVSVLTVLHQDWLNGKEYKCKVSNKALPAPIEKTISKAKGQPREPQVYTLPPSRDELTKNQVSLTCLVKGFYPSDIAVEWESNGQPENNYKTTPPVLDSDGSFFLYSKLTVDKSRWQQGNVFSCSVMHEALHNHYTQKSLSLSPGK

SEQ ID NO: 651 - protein, 248 aa, Artificial
  Synthetic
CNVNHKPSNTKVDKKVEPKSCDKTHTCPPCPAPELLGGPSVFLFPPKPKDTLMISRTPEVTCVVVDVSHEDPSVKFNWYVDGVEVHNAKTKPREEQYNSTYRVVSVLTVLHQDWLNGKEYKCKVSNKALPAPIEKTISKAKGQPREPQVYTLPPSRDELTKNQVSLTCLVKGFYPSDIAVEWESNGQPENNYKTTPPVLDSDGSFFLYSKLTVDKSRWQQGNVFSCSVMHEALHNHYTQKSLSLSPGK

SEQ ID NO: 652 - protein, 248 aa, Artificial
  Synthetic
CNVNHKPSNTKVDKKVEPKSCDKTHTCPPCPAPELLGGPSVFLFPPKPKDTLMISRTPEVTCVVVDVSHEDPKVKFNWYVDGVEVHNAKTKPREEQYNSTYRVVSVLTVLHQDWLNGKEYKCKVSNKALPAPIEKTISKAKGQPREPQVYTLPPSRDELTKNQVSLTCLVKGFYPSDIAVEWESNGQPENNYKTTPPVLDSDGSFFLYSKLTVDKSRWQQGNVFSCSVMHEALHNHYTQKSLSLSPGK

SEQ ID NO: 653 - protein, 248 aa, Artificial
  Synthetic
CNVNHKPSNTKVDKKVEPKSCDKTHTCPPCPAPELLGGPSVFLFPPKPKDTLMISRTPEVTCVVVDVSHEDPIVKFNWYVDGVEVHNAKTKPREEQYNSTYRVVSVLTVLHQDWLNGKEYKCKVSNKALPAPIEKTISKAKGQPREPQVYTLPPSRDELTKNQVSLTCLVKGFYPSDIAVEWESNGQPENNYKTTPPVLDSDGSFFLYSKLTVDKSRWQQGNVFSCSVMHEALHNHYTQKSLSLSPGK

SEQ ID NO: 654 - protein, 248 aa, Artificial
  Synthetic
CNVNHKPSNTKVDKKVEPKSCDKTHTCPPCPAPELLGGPSVFLFPPKPKDTLMISRTPEVTCVVVDVSHEDPYVKFNWYVDGVEVHNAKTKPREEQYNSTYRVVSVLTVLHQDWLNGKEYKCKVSNKALPAPIEKTISKAKGQPREPQVYTLPPSRDELTKNQVSLTCLVKGFYPSDIAVEWESNGQPENNYKTTPPVLDSDGSFFLYSKLTVDKSRWQQGNVFSCSVMHEALHNHYTQKSLSLSPGK

SEQ ID NO: 655 - protein, 248 aa, Artificial
  Synthetic
CNVNHKPSNTKVDKKVEPKSCDKTHTCPPCPAPELLGGPSVFLFPPKPKDTLMISRTPEVTCVVVDVSHEDPEIKFNWYVDGVEVHNAKTKPREEQYNSTYRVVSVLTVLHQDWLNGKEYKCKVSNKALPAPIEKTISKAKGQPREPQVYTLPPSRDELTKNQVSLTCLVKGFYPSDIAVEWESNGQPENNYKTTPPVLDSDGSFFLYSKLTVDKSRWQQGNVFSCSVMHEALHNHYTQKSLSLSPGK

SEQ ID NO: 656 - protein, 248 aa, Artificial
  Synthetic
CNVNHKPSNTKVDKKVEPKSCDKTHTCPPCPAPELLGGPSVFLFPPKPKDTLMISRTPEVTCVVVDVSHEDPEVTFNWYVDGVEVHNAKTKPREEQYNSTYRVVSVLTVLHQDWLNGKEYKCKVSNKALPAPIEKTISKAKGQPREPQVYTLPPSRDELTKNQVSLTCLVKGFYPSDIAVEWESNGQPENNYKTTPPVLDSDGSFFLYSKLTVDKSRWQQGNVFSCSVMHEALHNHYTQKSLSLSPGK

SEQ ID NO: 657 - protein, 248 aa, Artificial
  Synthetic
CNVNHKPSNTKVDKKVEPKSCDKTHTCPPCPAPELLGGPSVFLFPPKPKDTLMISRTPEVTCVVVDVSHEDPEVEFNWYVDGVEVHNAKTKPREEQYNSTYRVVSVLTVLHQDWLNGKEYKCKVSNKALPAPIEKTISKAKGQPREPQVYTLPPSRDELTKNQVSLTCLVKGFYPSDIAVEWESNGQPENNYKTTPPVLDSDGSFFLYSKLTVDKSRWQQGNVFSCSVMHEALHNHYTQKSLSLSPGK

SEQ ID NO: 658 - protein, 248 aa, Artificial
  Synthetic
CNVNHKPSNTKVDKKVEPKSCDKTHTCPPCPAPELLGGPSVFLFPPKPKDTLMISRTPEVTCVVVDVSHEDPEVRFNWYVDGVEVHNAKTKPREEQYNSTYRVVSVLTVLHQDWLNGKEYKCKVSNKALPAPIEKTISKAKGQPREPQVYTLPPSRDELTKNQVSLTCLVKGFYPSDIAVEWESNGQPENNYKTTPPVLDSDGSFFLYSKLTVDKSRWQQGNVFSCSVMHEALHNHYTQKSLSLSPGK

SEQ ID NO: 659 - protein, 248 aa, Artificial
  Synthetic
CNVNHKPSNTKVDKKVEPKSCDKTHTCPPCPAPELLGGPSVFLFPPKPKDTLMISRTPEVTCVVVDVSHEDPEVLFNWYVDGVEVHNAKTKPREEQYNSTYRVVSVLTVLHQDWLNGKEYKCKVSNKALPAPIEKTISKAKGQPREPQVYTLPPSRDELTKNQVSLTCLVKGFYPSDIAVEWESNGQPENNYKTTPPVLDSDGSFFLYSKLTVDKSRWQQGNVFSCSVMHEALHNHYTQKSLSLSPGK

SEQ ID NO: 660 - protein, 248 aa, Artificial
  Synthetic
CNVNHKPSNTKVDKKVEPKSCDKTHTCPPCPAPELLGGPSVFLFPPKPKDTLMISRTPEVTCVVVDVSHEDPEVYFNWYVDGVEVHNAKTKPREEQYNSTYRVVSVLTVLHQDWLNGKEYKCKVSNKALPAPIEKTISKAKGQPREPQVYTLPPSRDELTKNQVSLTCLVKGFYPSDIAVEWESNGQPENNYKTTPPVLDSDGSFFLYSKLTVDKSRWQQGNVFSCSVMHEALHNHYTQKSLSLSPGK

SEQ ID NO: 661 - protein, 248 aa, Artificial
  Synthetic
CNVNHKPSNTKVDKKVEPKSCDKTHTCPPCPAPELLGGPSVFLFPPKPKDTLMISRTPEVTCVVVDVSHEDPEVKWNWYVDGVEVHNAKTKPREEQYNSTYRVVSVLTVLHQDWLNGKEYKCKVSNKALPAPIEKTISKAKGQPREPQVYTLPPSRDELTKNQVSLTCLVKGFYPSDIAVEWESNGQPENNYKTTPPVLDSDGSFFLYSKLTVDKSRWQQGNVFSCSVMHEALHNHYTQKSLSLSPGK

SEQ ID NO: 662 - protein, 248 aa, Artificial
  Synthetic
CNVNHKPSNTKVDKKVEPKSCDKTHTCPPCPAPELLGGPSVFLFPPKPKDTLMISRTPEVTCVVVDVSHEDPEVKFSWYVDGVEVHNAKTKPREEQYNSTYRVVSVLTVLHQDWLNGKEYKCKVSNKALPAPIEKTISKAKGQPREPQVYTLPPSRDELTKNQVSLTCLVKGFYPSDIAVEWESNGQPENNYKTTPPVLDSDGSFFLYSKLTVDKSRWQQGNVFSCSVMHEALHNHYTQKSLSLSPGK

SEQ ID NO: 663 - protein, 248 aa, Artificial
  Synthetic
CNVNHKPSNTKVDKKVEPKSCDKTHTCPPCPAPELLGGPSVFLFPPKPKDTLMISRTPEVTCVVVDVSHEDPEVKFEWYVDGVEVHNAKTKPREEQYNSTYRVVSVLTVLHQDWLNGKEYKCKVSNKALPAPIEKTISKAKGQPREPQVYTLPPSRDELTKNQVSLTCLVKGFYPSDIAVEWESNGQPENNYKTTPPVLDSDGSFFLYSKLTVDKSRWQQGNVFSCSVMHEALHNHYTQKSLSLSPGK

SEQ ID NO: 664 - protein, 248 aa, Artificial
  Synthetic
CNVNHKPSNTKVDKKVEPKSCDKTHTCPPCPAPELLGGPSVFLFPPKPKDTLMISRTPEVTCVVVDVSHEDPEVKFRWYVDGVEVHNAKTKPREEQYNSTYRVVSVLTVLHQDWLNGKEYKCKVSNKALPAPIEKTISKAKGQPREPQVYTLPPSRDELTKNQVSLTCLVKGFYPSDIAVEWESNGQPENNYKTTPPVLDSDGSFFLYSKLTVDKSRWQQGNVFSCSVMHEALHNHYTQKSLSLSPGK

SEQ ID NO: 665 - protein, 248 aa, Artificial
  Synthetic
CNVNHKPSNTKVDKKVEPKSCDKTHTCPPCPAPELLGGPSVFLFPPKPKDTLMISRTPEVTCVVVDVSHEDPEVKFLWYVDGVEVHNAKTKPREEQYNSTYRVVSVLTVLHQDWLNGKEYKCKVSNKALPAPIEKTISKAKGQPREPQVYTLPPSRDELTKNQVSLTCLVKGFYPSDIAVEWESNGQPENNYKTTPPVLDSDGSFFLYSKLTVDKSRWQQGNVFSCSVMHEALHNHYTQKSLSLSPGK

SEQ ID NO: 666 - protein, 248 aa, Artificial
  Synthetic
CNVNHKPSNTKVDKKVEPKSCDKTHTCPPCPAPELLGGPSVFLFPPKPKDTLMISRTPEVTCVVVDVSHEDPEVKFYWYVDGVEVHNAKTKPREEQYNSTYRVVSVLTVLHQDWLNGKEYKCKVSNKALPAPIEKTISKAKGQPREPQVYTLPPSRDELTKNQVSLTCLVKGFYPSDIAVEWESNGQPENNYKTTPPVLDSDGSFFLYSKLTVDKSRWQQGNVFSCSVMHEALHNHYTQKSLSLSPGK

SEQ ID NO: 667 - protein, 248 aa, Artificial
  Synthetic
CNVNHKPSNTKVDKKVEPKSCDKTHTCPPCPAPELLGGPSVFLFPPKPKDTLMISRTPEVTCVVVDVSHEDPEVKFNWTVDGVEVHNAKTKPREEQYNSTYRVVSVLTVLHQDWLNGKEYKCKVSNKALPAPIEKTISKAKGQPREPQVYTLPPSRDELTKNQVSLTCLVKGFYPSDIAVEWESNGQPENNYKTTPPVLDSDGSFFLYSKLTVDKSRWQQGNVFSCSVMHEALHNHYTQKSLSLSPGK

SEQ ID NO: 668 - protein, 248 aa, Artificial
  Synthetic
CNVNHKPSNTKVDKKVEPKSCDKTHTCPPCPAPELLGGPSVFLFPPKPKDTLMISRTPEVTCVVVDVSHEDPEVKFNWEVDGVEVHNAKTKPREEQYNSTYRVVSVLTVLHQDWLNGKEYKCKVSNKALPAPIEKTISKAKGQPREPQVYTLPPSRDELTKNQVSLTCLVKGFYPSDIAVEWESNGQPENNYKTTPPVLDSDGSFFLYSKLTVDKSRWQQGNVFSCSVMHEALHNHYTQKSLSLSPGK

SEQ ID NO: 669 - protein, 248 aa, Artificial
  Synthetic
CNVNHKPSNTKVDKKVEPKSCDKTHTCPPCPAPELLGGPSVFLFPPKPKDTLMISRTPEVTCVVVDVSHEDPEVKFNWKVDGVEVHNAKTKPREEQYNSTYRVVSVLTVLHQDWLNGKEYKCKVSNKALPAPIEKTISKAKGQPREPQVYTLPPSRDELTKNQVSLTCLVKGFYPSDIAVEWESNGQPENNYKTTPPVLDSDGSFFLYSKLTVDKSRWQQGNVFSCSVMHEALHNHYTQKSLSLSPGK

SEQ ID NO: 670 - protein, 248 aa, Artificial
  Synthetic
CNVNHKPSNTKVDKKVEPKSCDKTHTCPPCPAPELLGGPSVFLFPPKPKDTLMISRTPEVTCVVVDVSHEDPEVKFNWWVDGVEVHNAKTKPREEQYNSTYRVVSVLTVLHQDWLNGKEYKCKVSNKALPAPIEKTISKAKGQPREPQVYTLPPSRDELTKNQVSLTCLVKGFYPSDIAVEWESNGQPENNYKTTPPVLDSDGSFFLYSKLTVDKSRWQQGNVFSCSVMHEALHNHYTQKSLSLSPGK

SEQ ID NO: 671 - protein, 248 aa, Artificial
  Synthetic
CNVNHKPSNTKVDKKVEPKSCDKTHTCPPCPAPELLGGPSVFLFPPKPKDTLMISRTPEVTCVVVDVSHEDPEVKFNWYVDGVRVHNAKTKPREEQYNSTYRVVSVLTVLHQDWLNGKEYKCKVSNKALPAPIEKTISKAKGQPREPQVYTLPPSRDELTKNQVSLTCLVKGFYPSDIAVEWESNGQPENNYKTTPPVLDSDGSFFLYSKLTVDKSRWQQGNVFSCSVMHEALHNHYTQKSLSLSPGK

SEQ ID NO: 672 - protein, 248 aa, Artificial
  Synthetic
CNVNHKPSNTKVDKKVEPKSCDKTHTCPPCPAPELLGGPSVFLFPPKPKDTLMISRTPEVTCVVVDVSHEDPEVKFNWYVDGVEVHNAKTKPREEQYNSTYRIVSVLTVLHQDWLNGKEYKCKVSNKALPAPIEKTISKAKGQPREPQVYTLPPSRDELTKNQVSLTCLVKGFYPSDIAVEWESNGQPENNYKTTPPVLDSDGSFFLYSKLTVDKSRWQQGNVFSCSVMHEALHNHYTQKSLSLSPGK

SEQ ID NO: 673 - protein, 248 aa, Artificial
  Synthetic
CNVNHKPSNTKVDKKVEPKSCDKTHTCPPCPAPELLGGPSVFLFPPKPKDTLMISRTPEVTCVVVDVSHEDPEVKFNWYVDGVEVHNAKTKPREEQYNSTYRVVSVLTVLHQDWLNGKRYKCKVSNKALPAPIEKTISKAKGQPREPQVYTLPPSRDELTKNQVSLTCLVKGFYPSDIAVEWESNGQPENNYKTTPPVLDSDGSFFLYSKLTVDKSRWQQGNVFSCSVMHEALHNHYTQKSLSLSPGK

SEQ ID NO: 674 - protein, 248 aa, Artificial
  Synthetic
CNVNHKPSNTKVDKKVEPKSCDKTHTCPPCPAPELLGGPSVFLFPPKPKDTLMISRTPEVTCVVVDVSHEDPEVKFNWYVDGVEVHNAKTKPREEQYNSTYRVVSVLTVLHQDWLNGKEYTCKVSNKALPAPIEKTISKAKGQPREPQVYTLPPSRDELTKNQVSLTCLVKGFYPSDIAVEWESNGQPENNYKTTPPVLDSDGSFFLYSKLTVDKSRWQQGNVFSCSVMHEALHNHYTQKSLSLSPGK

SEQ ID NO: 675 - protein, 248 aa, Artificial
  Synthetic
CNVNHKPSNTKVDKKVEPKSCDKTHTCPPCPAPELLGGPSVFLFPPKPKDTLMISRTPEVTCVVVDVSHEDPEVKFNWYVDGVEVHNAKTKPREEQYNSTYRVVSVLTVLHQDWLNGKEYDCKVSNKALPAPIEKTISKAKGQPREPQVYTLPPSRDELTKNQVSLTCLVKGFYPSDIAVEWESNGQPENNYKTTPPVLDSDGSFFLYSKLTVDKSRWQQGNVFSCSVMHEALHNHYTQKSLSLSPGK

SEQ ID NO: 676 - protein, 248 aa, Artificial
  Synthetic
CNVNHKPSNTKVDKKVEPKSCDKTHTCPPCPAPELLGGPSVFLFPPKPKDTLMISRTPEVTCVVVDVSHEDPEVKFNWYVDGVEVHNAKTKPREEQYNSTYRVVSVLTVLHQDWLNGKEYICKVSNKALPAPIEKTISKAKGQPREPQVYTLPPSRDELTKNQVSLTCLVKGFYPSDIAVEWESNGQPENNYKTTPPVLDSDGSFFLYSKLTVDKSRWQQGNVFSCSVMHEALHNHYTQKSLSLSPGK

SEQ ID NO: 677 - protein, 248 aa, Artificial
  Synthetic
CNVNHKPSNTKVDKKVEPKSCDKTHTCPPCPAPELLGGPSVFLFPPKPKDTLMISRTPEVTCVVVDVSHEDPEVKFNWYVDGVEVHNAKTKPREEQYNSTYRVVSVLTVLHQDWLNGKEYKCTVSNKALPAPIEKTISKAKGQPREPQVYTLPPSRDELTKNQVSLTCLVKGFYPSDIAVEWESNGQPENNYKTTPPVLDSDGSFFLYSKLTVDKSRWQQGNVFSCSVMHEALHNHYTQKSLSLSPGK

SEQ ID NO: 678 - protein, 248 aa, Artificial
  Synthetic
CNVNHKPSNTKVDKKVEPKSCDKTHTCPPCPAPELLGGPSVFLFPPKPKDTLMISRTPEVTCVVVDVSHEDPEVKFNWYVDGVEVHNAKTKPREEQYNSTYRVVSVLTVLHQDWLNGKEYKCHVSNKALPAPIEKTISKAKGQPREPQVYTLPPSRDELTKNQVSLTCLVKGFYPSDIAVEWESNGQPENNYKTTPPVLDSDGSFFLYSKLTVDKSRWQQGNVFSCSVMHEALHNHYTQKSLSLSPGK

SEQ ID NO: 679 - protein, 248 aa, Artificial
  Synthetic
CNVNHKPSNTKVDKKVEPKSCDKTHTCPPCPAPELLGGPSVFLFPPKPKDTLMISRTPEVTCVVVDVSHEDPEVKFNWYVDGVEVHNAKTKPREEQYNSTYRVVSVLTVLHQDWLNGKEYKCKISNKALPAPIEKTISKAKGQPREPQVYTLPPSRDELTKNQVSLTCLVKGFYPSDIAVEWESNGQPENNYKTTPPVLDSDGSFFLYSKLTVDKSRWQQGNVFSCSVMHEALHNHYTQKSLSLSPGK

SEQ ID NO: 680 - protein, 248 aa, Artificial
  Synthetic
CNVNHKPSNTKVDKKVEPKSCDKTHTCPPCPAPELLGGPSVFLFPPKPKDTLMISRTPEVTCVVVDVSHEDPEVKFNWYVDGVEVHNAKTKPREEQYNSTYRVVSVLTVLHQDWLNGKEYKCKVTNKALPAPIEKTISKAKGQPREPQVYTLPPSRDELTKNQVSLTCLVKGFYPSDIAVEWESNGQPENNYKTTPPVLDSDGSFFLYSKLTVDKSRWQQGNVFSCSVMHEALHNHYTQKSLSLSPGK

SEQ ID NO: 681 - protein, 248 aa, Artificial
  Synthetic
CNVNHKPSNTKVDKKVEPKSCDKTHTCPPCPAPELLGGPSVFLFPPKPKDTLMISRTPEVTCVVVDVSHEDPEVKFNWYVDGVEVHNAKTKPREEQYNSTYRVVSVLTVLHQDWLNGKEYKCKVDNKALPAPIEKTISKAKGQPREPQVYTLPPSRDELTKNQVSLTCLVKGFYPSDIAVEWESNGQPENNYKTTPPVLDSDGSFFLYSKLTVDKSRWQQGNVFSCSVMHEALHNHYTQKSLSLSPGK

SEQ ID NO: 682 - protein, 248 aa, Artificial
  Synthetic
CNVNHKPSNTKVDKKVEPKSCDKTHTCPPCPAPELLGGPSVFLFPPKPKDTLMISRTPEVTCVVVDVSHEDPEVKFNWYVDGVEVHNAKTKPREEQYNSTYRVVSVLTVLHQDWLNGKEYKCKVRNKALPAPIEKTISKAKGQPREPQVYTLPPSRDELTKNQVSLTCLVKGFYPSDIAVEWESNGQPENNYKTTPPVLDSDGSFFLYSKLTVDKSRWQQGNVFSCSVMHEALHNHYTQKSLSLSPGK

SEQ ID NO: 683 - protein, 248 aa, Artificial
  Synthetic
CNVNHKPSNTKVDKKVEPKSCDKTHTCPPCPAPELLGGPSVFLFPPKPKDTLMISRTPEVTCVVVDVSHEDPEVKFNWYVDGVEVHNAKTKPREEQYNSTYRVVSVLTVLHQDWLNGKEYKCKVINKALPAPIEKTISKAKGQPREPQVYTLPPSRDELTKNQVSLTCLVKGFYPSDIAVEWESNGQPENNYKTTPPVLDSDGSFFLYSKLTVDKSRWQQGNVFSCSVMHEALHNHYTQKSLSLSPGK

SEQ ID NO: 684 - protein, 248 aa, Artificial
  Synthetic
CNVNHKPSNTKVDKKVEPKSCDKTHTCPPCPAPELLGGPSVFLFPPKPKDTLMISRTPEVTCVVVDVSHEDPEVKFNWYVDGVEVHNAKTKPREEQYNSTYRVVSVLTVLHQDWLNGKEYKCKVVNKALPAPIEKTISKAKGQPREPQVYTLPPSRDELTKNQVSLTCLVKGFYPSDIAVEWESNGQPENNYKTTPPVLDSDGSFFLYSKLTVDKSRWQQGNVFSCSVMHEALHNHYTQKSLSLSPGK

SEQ ID NO: 685 - protein, 248 aa, Artificial
  Synthetic
CNVNHKPSNTKVDKKVEPKSCDKTHTCPPCPAPELLGGPSVFLFPPKPKDTLMISRTPEVTCVVVDVSHEDPEVKFNWYVDGVEVHNAKTKPREEQYNSTYRVVSVLTVLHQDWLNGKEYKCKVLNKALPAPIEKTISKAKGQPREPQVYTLPPSRDELTKNQVSLTCLVKGFYPSDIAVEWESNGQPENNYKTTPPVLDSDGSFFLYSKLTVDKSRWQQGNVFSCSVMHEALHNHYTQKSLSLSPGK

SEQ ID NO: 686 - protein, 248 aa, Artificial
  Synthetic
CNVNHKPSNTKVDKKVEPKSCDKTHTCPPCPAPELLGGPSVFLFPPKPKDTLMISRTPEVTCVVVDVSHEDPEVKFNWYVDGVEVHNAKTKPREEQYNSTYRVVSVLTVLHQDWLNGKEYKCKVYNKALPAPIEKTISKAKGQPREPQVYTLPPSRDELTKNQVSLTCLVKGFYPSDIAVEWESNGQPENNYKTTPPVLDSDGSFFLYSKLTVDKSRWQQGNVFSCSVMHEALHNHYTQKSLSLSPGK

SEQ ID NO: 687 - protein, 248 aa, Artificial
  Synthetic
CNVNHKPSNTKVDKKVEPKSCDKTHTCPPCPAPELLGGPSVFLFPPKPKDTLMISRTPEVTCVVVDVSHEDPEVKFNWYVDGVEVHNAKTKPREEQYNSTYRVVSVLTVLHQDWLNGKEYKCKVSNLALPAPIEKTISKAKGQPREPQVYTLPPSRDELTKNQVSLTCLVKGFYPSDIAVEWESNGQPENNYKTTPPVLDSDGSFFLYSKLTVDKSRWQQGNVFSCSVMHEALHNHYTQKSLSLSPGK

SEQ ID NO: 688 - protein, 248 aa, Artificial
  Synthetic
CNVNHKPSNTKVDKKVEPKSCDKTHTCPPCPAPELLGGPSVFLFPPKPKDTLMISRTPEVTCVVVDVSHEDPEVKFNWYVDGVEVHNAKTKPREEQYNSTYRVVSVLTVLHQDWLNGKEYKCKVSNIALPAPIEKTISKAKGQPREPQVYTLPPSRDELTKNQVSLTCLVKGFYPSDIAVEWESNGQPENNYKTTPPVLDSDGSFFLYSKLTVDKSRWQQGNVFSCSVMHEALHNHYTQKSLSLSPGK

SEQ ID NO: 689 - protein, 248 aa, Artificial
  Synthetic
CNVNHKPSNTKVDKKVEPKSCDKTHTCPPCPAPELLGGPSVFLFPPKPKDTLMISRTPEVTCVVVDVSHEDPEVKFNWYVDGVEVHNAKTKPREEQYNSTYRVVSVLTVLHQDWLNGKEYKCKVSNTALPAPIEKTISKAKGQPREPQVYTLPPSRDELTKNQVSLTCLVKGFYPSDIAVEWESNGQPENNYKTTPPVLDSDGSFFLYSKLTVDKSRWQQGNVFSCSVMHEALHNHYTQKSLSLSPGK

SEQ ID NO: 690 - protein, 248 aa, Artificial
  Synthetic
CNVNHKPSNTKVDKKVEPKSCDKTHTCPPCPAPELLGGPSVFLFPPKPKDTLMISRTPEVTCVVVDVSHEDPEVKFNWYVDGVEVHNAKTKPREEQYNSTYRVVSVLTVLHQDWLNGKEYKCKVSNKDLPAPIEKTISKAKGQPREPQVYTLPPSRDELTKNQVSLTCLVKGFYPSDIAVEWESNGQPENNYKTTPPVLDSDGSFFLYSKLTVDKSRWQQGNVFSCSVMHEALHNHYTQKSLSLSPGK

SEQ ID NO: 691 - protein, 248 aa, Artificial
  Synthetic
CNVNHKPSNTKVDKKVEPKSCDKTHTCPPCPAPELLGGPSVFLFPPKPKDTLMISRTPEVTCVVVDVSHEDPEVKFNWYVDGVEVHNAKTKPREEQYNSTYRVVSVLTVLHQDWLNGKEYKCKVSNKTLPAPIEKTISKAKGQPREPQVYTLPPSRDELTKNQVSLTCLVKGFYPSDIAVEWESNGQPENNYKTTPPVLDSDGSFFLYSKLTVDKSRWQQGNVFSCSVMHEALHNHYTQKSLSLSPGK

SEQ ID NO: 692 - protein, 248 aa, Artificial
  Synthetic
CNVNHKPSNTKVDKKVEPKSCDKTHTCPPCPAPELLGGPSVFLFPPKPKDTLMISRTPEVTCVVVDVSHEDPEVKFNWYVDGVEVHNAKTKPREEQYNSTYRVVSVLTVLHQDWLNGKEYKCKVSNKALPSPIEKTISKAKGQPREPQVYTLPPSRDELTKNQVSLTCLVKGFYPSDIAVEWESNGQPENNYKTTPPVLDSDGSFFLYSKLTVDKSRWQQGNVFSCSVMHEALHNHYTQKSLSLSPGK

SEQ ID NO: 693 - protein, 248 aa, Artificial
  Synthetic
CNVNHKPSNTKVDKKVEPKSCDKTHTCPPCPAPELLGGPSVFLFPPKPKDTLMISRTPEVTCVVVDVSHEDPEVKFNWYVDGVEVHNAKTKPREEQYNSTYRVVSVLTVLHQDWLNGKEYKCKVSNKALPWPIEKTISKAKGQPREPQVYTLPPSRDELTKNQVSLTCLVKGFYPSDIAVEWESNGQPENNYKTTPPVLDSDGSFFLYSKLTVDKSRWQQGNVFSCSVMHEALHNHYTQKSLSLSPGK

SEQ ID NO: 694 - protein, 248 aa, Artificial
  Synthetic
CNVNHKPSNTKVDKKVEPKSCDKTHTCPPCPAPELLGGPSVFLFPPKPKDTLMISRTPEVTCVVVDVSHEDPEVKFNWYVDGVEVHNAKTKPREEQYNSTYRVVSVLTVLHQDWLNGKEYKCKVSNKALPMPIEKTISKAKGQPREPQVYTLPPSRDELTKNQVSLTCLVKGFYPSDIAVEWESNGQPENNYKTTPPVLDSDGSFFLYSKLTVDKSRWQQGNVFSCSVMHEALHNHYTQKSLSLSPGK

SEQ ID NO: 695 - protein, 248 aa, Artificial
  Synthetic
CNVNHKPSNTKVDKKVEPKSCDKTHTCPPCPAPELLGGPSVFLFPPKPKDTLMISRTPEVTCVVVDVSHEDPEVKFNWYVDGVEVHNAKTKPREEQYNSTYRVVSVLTVLHQDWLNGKEYKCKVSNKALPAVIEKTISKAKGQPREPQVYTLPPSRDELTKNQVSLTCLVKGFYPSDIAVEWESNGQPENNYKTTPPVLDSDGSFFLYSKLTVDKSRWQQGNVFSCSVMHEALHNHYTQKSLSLSPGK

SEQ ID NO: 696 - protein, 248 aa, Artificial
  Synthetic
CNVNHKPSNTKVDKKVEPKSCDKTHTCPPCPAPELLGGPSVFLFPPKPKDTLMISRTPEVTCVVVDVSHEDPEVKFNWYVDGVEVHNAKTKPREEQYNSTYRVVSVLTVLHQDWLNGKEYKCKVSNKALPAHIEKTISKAKGQPREPQVYTLPPSRDELTKNQVSLTCLVKGFYPSDIAVEWESNGQPENNYKTTPPVLDSDGSFFLYSKLTVDKSRWQQGNVFSCSVMHEALHNHYTQKSLSLSPGK

SEQ ID NO: 697 - protein, 248 aa, Artificial
  Synthetic
CNVNHKPSNTKVDKKVEPKSCDKTHTCPPCPAPELLGGPSVFLFPPKPKDTLMISRTPEVTCVVVDVSHEDPEVKFNWYVDGVEVHNAKTKPREEQYNSTYRVVSVLTVLHQDWLNGKEYKCKVSNKALPAPITKTISKAKGQPREPQVYTLPPSRDELTKNQVSLTCLVKGFYPSDIAVEWESNGQPENNYKTTPPVLDSDGSFFLYSKLTVDKSRWQQGNVFSCSVMHEALHNHYTQKSLSLSPGK

SEQ ID NO: 698 - protein, 248 aa, Artificial
  Synthetic
CNVNHKPSNTKVDKKVEPKSCDKTHTCPPCPAPELLGGPSVFLFPPKPKDTLMISRTPEVTCVVVDVSHEDPEVKFNWYVDGVEVHNAKTKPREEQYNSTYRVVSVLTVLHQDWLNGKEYKCKVSNKALPAPIHKTISKAKGQPREPQVYTLPPSRDELTKNQVSLTCLVKGFYPSDIAVEWESNGQPENNYKTTPPVLDSDGSFFLYSKLTVDKSRWQQGNVFSCSVMHEALHNHYTQKSLSLSPGK

SEQ ID NO: 699 - protein, 248 aa, Artificial
  Synthetic
CNVNHKPSNTKVDKKVEPKSCDKTHTCPPCPAPELLGGPSVFLFPPKPKDTLMISRTPEVTCVVVDVSHEDPEVKFNWYVDGVEVHNAKTKPREEQYNSTYRVVSVLTVLHQDWLNGKEYKCKVSNKALPAPIIKTISKAKGQPREPQVYTLPPSRDELTKNQVSLTCLVKGFYPSDIAVEWESNGQPENNYKTTPPVLDSDGSFFLYSKLTVDKSRWQQGNVFSCSVMHEALHNHYTQKSLSLSPGK

SEQ ID NO: 700 - protein, 248 aa, Artificial
  Synthetic
CNVNHKPSNTKVDKKVEPKSCDKTHTCPPCPAPELLGGPSVFLFPPKPKDTLMISRTPEVTCVVVDVSHEDPEVKFNWYVDGVEVHNAKTKPREEQYNSTYRVVSVLTVLHQDWLNGKEYKCKVSNKALPAPIYKTISKAKGQPREPQVYTLPPSRDELTKNQVSLTCLVKGFYPSDIAVEWESNGQPENNYKTTPPVLDSDGSFFLYSKLTVDKSRWQQGNVFSCSVMHEALHNHYTQKSLSLSPGK

SEQ ID NO: 701 - protein, 248 aa, Artificial
  Synthetic
CNVNHKPSNTKVDKKVEPKSCDKTHTCPPCPAPELLGGPSVFLFPPKPKDTLMISRTPEVTCVVVDVSHEDPEVKFNWYVDGVEVHNAKTKPREEQYNSTYRVVSVLTVLHQDWLNGKEYKCKVSNKALPAPIEITISKAKGQPREPQVYTLPPSRDELTKNQVSLTCLVKGFYPSDIAVEWESNGQPENNYKTTPPVLDSDGSFFLYSKLTVDKSRWQQGNVFSCSVMHEALHNHYTQKSLSLSPGK

SEQ ID NO: 702 - protein, 248 aa, Artificial
  Synthetic
CNVNHKPSNTKVDKKVEPKSCDKTHTCPPCPAPELLGGPSVFLFPPKPKDTLMISRTPEVTCVVVDVSHEDPEVKFNWYVDGVEVHNAKTKPREEQYNSTYRVVSVLTVLHQDWLNGKEYKCKVSNKALPAPIETTISKAKGQPREPQVYTLPPSRDELTKNQVSLTCLVKGFYPSDIAVEWESNGQPENNYKTTPPVLDSDGSFFLYSKLTVDKSRWQQGNVFSCSVMHEALHNHYTQKSLSLSPGK

SEQ ID NO: 703 - protein, 248 aa, Artificial
  Synthetic
CNVNHKPSNTKVDKKVEPKSCDKTHTCPPCPAPELLGGPSVFLFPPKPKDTLMISRTPEVTCVVVDVSHEDPEVKFNWYVDGVEVHNAKTKPREEQYNSTYRVVSVLTVLHQDWLNGKEYKCKVSNKALPAPIEFTISKAKGQPREPQVYTLPPSRDELTKNQVSLTCLVKGFYPSDIAVEWESNGQPENNYKTTPPVLDSDGSFFLYSKLTVDKSRWQQGNVFSCSVMHEALHNHYTQKSLSLSPGK

SEQ ID NO: 704 - protein, 248 aa, Artificial
  Synthetic
CNVNHKPSNTKVDKKVEPKSCDKTHTCPPCPAPELLGGPSVFLFPPKPKDTLMISRTPEVTCVVVDVSHEDPEVKFNWYVDGVEVHNAKTKPREEQYNSTYRVVSVLTVLHQDWLNGKEYKCKVSNKALPAPIEKDISKAKGQPREPQVYTLPPSRDELTKNQVSLTCLVKGFYPSDIAVEWESNGQPENNYKTTPPVLDSDGSFFLYSKLTVDKSRWQQGNVFSCSVMHEALHNHYTQKSLSLSPGK

SEQ ID NO: 705 - protein, 248 aa, Artificial
  Synthetic
CNVNHKPSNTKVDKKVEPKSCDKTHTCPPCPAPELLGGPSVFLFPPKPKDTLMISRTPEVTCVVVDVSHEDPEVKFNWYVDGVEVHNAKTKPREEQYNSTYRVVSVLTVLHQDWLNGKEYKCKVSNKALPAPIEKRISKAKGQPREPQVYTLPPSRDELTKNQVSLTCLVKGFYPSDIAVEWESNGQPENNYKTTPPVLDSDGSFFLYSKLTVDKSRWQQGNVFSCSVMHEALHNHYTQKSLSLSPGK

SEQ ID NO: 706 - protein, 248 aa, Artificial
  Synthetic
CNVNHKPSNTKVDKKVEPKSCDKTHTCPPCPAPELLGGPSVFLFPPKPKDTLMISRTPEVTCVVVDVSHEDPEVKFNWYVDGVEVHNAKTKPREEQYNSTYRVVSVLTVLHQDWLNGKEYKCKVSNKALPAPIEKYISKAKGQPREPQVYTLPPSRDELTKNQVSLTCLVKGFYPSDIAVEWESNGQPENNYKTTPPVLDSDGSFFLYSKLTVDKSRWQQGNVFSCSVMHEALHNHYTQKSLSLSPGK

SEQ ID NO: 707 - protein, 248 aa, Artificial
  Synthetic
CNVNHKPSNTKVDKKVEPKSCDKTHTCPPCPAPEIDGGPSVFLFPPKPKDTLMISRTPEVTCVVVDVSHEDPEVKFNWYVDGVEVHNAKTKPREEQYNSTYRVVSVLTVLHQDWLNGKEYKCKVSNKALPAPIEKTISKAKGQPREPQVYTLPPSRDELTKNQVSLTCLVKGFYPSDIAVEWESNGQPENNYKTTPPVLDSDGSFFLYSKLTVDKSRWQQGNVFSCSVMHEALHNHYTQKSLSLSPGK

SEQ ID NO: 708 - protein, 248 aa, Artificial
  Synthetic
CNVNHKPSNTKVDKKVEPKSCDKTHTCPPCPAPELLGGPSIFLFPPKPKDTLMISRTPEVTCVVVDISHEDPEVKFNWYVDGVEVHNAKTKPREEQYNSTYRVVSVLTVLHQDWLNGKEYKCKVSNKALPAPIEKTISKAKGQPREPQVYTLPPSRDELTKNQVSLTCLVKGFYPSDIAVEWESNGQPENNYKTTPPVLDSDGSFFLYSKLTVDKSRWQQGNVFSCSVMHEALHNHYTQKSLSLSPGK

SEQ ID NO: 709 - protein, 248 aa, Artificial
  Synthetic
CNVNHKPSNTKVDKKVEPKSCDKTHTCPPCPAPEILGGPDVFLFPPKPKDTLMISRTPEVTCVVVDVSHEDPEVKFNWYVDGVEVHNAKTKPREEQYNSTYRVVSVLTVLHQDWLNGKEYKCKVSNKALPYPEEKTISKAKGQPREPQVYTLPPSRDELTKNQVSLTCLVKGFYPSDIAVEWESNGQPENNYKTTPPVLDSDGSFFLYSKLTVDKSRWQQGNVFSCSVMHEALHNHYTQKSLSLSPGK

SEQ ID NO: 710 - protein, 248 aa, Artificial
  Synthetic
CNVNHKPSNTKVDKKVEPKSCDKTHTCPPCPAPELDGGPDVFLFPPKPKDTLMISRTPEVTCVVVDVSHEDPEVKFNWYVDGVEVHNAKTKPREEQYNSTYRVVSVLTVLHQDWLNGKEYKCKVSNKALPYPEEKTISKAKGQPREPQVYTLPPSRDELTKNQVSLTCLVKGFYPSDIAVEWESNGQPENNYKTTPPVLDSDGSFFLYSKLTVDKSRWQQGNVFSCSVMHEALHNHYTQKSLSLSPGK

SEQ ID NO: 711 - protein, 248 aa, Artificial
  Synthetic
CNVNHKPSNTKVDKKVEPKSCDKTHTCPPCPAPELLGGPDIFLFPPKPKDTLMISRTPEVTCVVVDVSHEDPEVKFNWYVDGVEVHNAKTKPREEQYNSTYRVVSVLTVLHQDWLNGKEYKCKVSNKALPYPEEKTISKAKGQPREPQVYTLPPSRDELTKNQVSLTCLVKGFYPSDIAVEWESNGQPENNYKTTPPVLDSDGSFFLYSKLTVDKSRWQQGNVFSCSVMHEALHNHYTQKSLSLSPGK

SEQ ID NO: 712 - protein, 248 aa, Artificial
  Synthetic
CNVNHKPSNTKVDKKVEPKSCDKTHTCPPCPAPELLGGPDVFLFPPKPKDTLMISRTPEVTCVVTDVSHEDPEVKFNWYVDGVEVHNAKTKPREEQYNSTYRVVSVLTVLHQDWLNGKEYKCKVSNKALPYPEEKTISKAKGQPREPQVYTLPPSRDELTKNQVSLTCLVKGFYPSDIAVEWESNGQPENNYKTTPPVLDSDGSFFLYSKLTVDKSRWQQGNVFSCSVMHEALHNHYTQKSLSLSPGK

SEQ ID NO: 713 - protein, 248 aa, Artificial
  Synthetic
CNVNHKPSNTKVDKKVEPKSCDKTHTCPPCPAPELLGGPDVFLFPPKPKDTLMISRTPEVTCVVVDISHEDPEVKFNWYVDGVEVHNAKTKPREEQYNSTYRVVSVLTVLHQDWLNGKEYKCKVSNKALPYPEEKTISKAKGQPREPQVYTLPPSRDELTKNQVSLTCLVKGFYPSDIAVEWESNGQPENNYKTTPPVLDSDGSFFLYSKLTVDKSRWQQGNVFSCSVMHEALHNHYTQKSLSLSPGK

SEQ ID NO: 714 - protein, 248 aa, Artificial
  Synthetic
CNVNHKPSNTKVDKKVEPKSCDKTHTCPPCPAPELLGGPDVFLFPPKPKDTLMISRTPEVTCVVVDVSHEDPEVKFNWYVDGVEVHNAKTKPREEQYNSTYRVVSVLTVLHQDWLNGKEYKCKVSNEALPYPEEKTISKAKGQPREPQVYTLPPSRDELTKNQVSLTCLVKGFYPSDIAVEWESNGQPENNYKTTPPVLDSDGSFFLYSKLTVDKSRWQQGNVFSCSVMHEALHNHYTQKSLSLSPGK

SEQ ID NO: 715 - protein, 248 aa, Artificial
  Synthetic
CNVNHKPSNTKVDKKVEPKSCDKTHTCPPCPAPELLGGPDVFLFPPKPKDTLMISRTPEVTCVVVDVSHEDPEVKFNWYVDGVEVHNAKTKPREEQYNSTYRVVSVLTVLHQDWLNGKEYKCKVSNTALPYPEEKTISKAKGQPREPQVYTLPPSRDELTKNQVSLTCLVKGFYPSDIAVEWESNGQPENNYKTTPPVLDSDGSFFLYSKLTVDKSRWQQGNVFSCSVMHEALHNHYTQKSLSLSPGK

SEQ ID NO: 716 - protein, 248 aa, Artificial
  Synthetic
CNVNHKPSNTKVDKKVEPKSCDKTHTCPPCPAPELLGGPDVFLFPPKPKDTLMISRTPEVTCVVVDVSHEDPEVKFNWYVDGVEVHNAKTKPREEQYDSTYRVVSVLTVLHQDWLNGKEYKCKVSNKALPYPEEKTISKAKGQPREPQVYTLPPSRDELTKNQVSLTCLVKGFYPSDIAVEWESNGQPENNYKTTPPVLDSDGSFFLYSKLTVDKSRWQQGNVFSCSVMHEALHNHYTQKSLSLSPGK

SEQ ID NO: 717 - protein, 248 aa, Artificial
  Synthetic
CNVNHKPSNTKVDKKVEPKSCDKTHTCPPCPAPELLGGPDVSLHPPKPKDTLMISRTPEVTCTVTDVSHEDPEVKFNWYVDGVEVHNAKTKPREEQYDSTYRVVSVLTVLHQDWLNGKEYKCKVSNKALPYPEEKTISKAKGQPREPQVYTLPPSRDELTKNQVSLTCLVKGFYPSDIAVEWESNGQPENNYKTTPPVLDSDGSFFLYSKLTVDKSRWQQGNVFSCSVMHEALHNHYTQKSLSLSPGK

SEQ ID NO: 718 - protein, 248 aa, Artificial
  Synthetic
CNVNHKPSNTKVDKKVEPKSCDKTHTCPPCPAPELDGGPDVFLFPPKPKDTLMISRTPEVTCVVVDVSHEDPEVKFNWYVDGVEVHNAKTKPREEQYDSTYRVVSVLTVLHQDWLNGKEYKCKVSNKALPAPEEKTISKAKGQPREPQVYTLPPSRDELTKNQVSLTCLVKGFYPSDIAVEWESNGQPENNYKTTPPVLDSDGSFFLYSKLTVDKSRWQQGNVFSCSVMHEALHNHYTQKSLSLSPGK

SEQ ID NO: 719 - protein, 248 aa, Artificial
  Synthetic
CNVNHKPSNTKVDKKVEPKSCDKTHTCPPCPAPELLGGPDVFLFPPKPKDTLMISRTPEVTCVVVDVSHEDPEVKFNWYVDGVEVHNAKTKPREEQYDSTYRVVSVLTVLHQDWLNGKEYKCKVSNEALPAPEEKTISKAKGQPREPQVYTLPPSRDELTKNQVSLTCLVKGFYPSDIAVEWESNGQPENNYKTTPPVLDSDGSFFLYSKLTVDKSRWQQGNVFSCSVMHEALHNHYTQKSLSLSPGK

SEQ ID NO: 720 - protein, 248 aa, Artificial
  Synthetic
CNVNHKPSNTKVDKKVEPKSCDKTHTCPPCPAPELLGGPSVFLFPPKPKDTLLISRTPEVTCVVVDVSHEDPEVKFNWYVDGVEVHNAKTKPREEQYNSTYRVVSVLTVLHQDWLNGKEYKCKVSNKALPAPIEKTISKAKGQPREPQVYTLPPSRDELTKNQVSLTCLVKGFYPSDIAVEWESNGQPENNYKTTPPVLDSDGSFFLYSKLTVDKSRWQQGNVFSCMVMHEALHLHYTQKSLSLSPGK

SEQ ID NO: 721 - protein, 248 aa, Artificial
  Synthetic
CNVNHKPSNTKVDKKVEPKSCDKTHTCPPCPAPELLGGPSVFLFPPKPKDTLLISRTPEVTCVVVDVSHEDPEVKFNWYVDGVEVHNAKTKPREEQYNSTYRVVSVLTVLHQDWLNGKEYKCKVSNKALPAPIEKTISKAKGQPREPQVYTLPPSRDELTKNQVSLTCLVKGFYPSDIAVEWLSNGQPENNYKTTPPVLDSDGSFFLYSKLTVDKSRWQQGNVFSCMVMHEALHLHFTQKSLSLSPGK

SEQ ID NO: 722 - protein, 248 aa, Artificial
  Synthetic
CNVNHKPSNTKVDKKVEPKSCDKTHTCPPCPAPELLGGPSVFLFPPKPKDTLLISRTPEVTCVVVDVSHEDPEVKFNWYVDGVEVHNAKTKPREEQYNSTYRVVSVLTVLHQDWLNGKEYKCKVSNKALPAPIEKTISKAKGQPREPQVYTLPPSRDELTKNQVSLTCLVKGFYPSDIAVEWLSNGQPENNYKTTPPVLDSDGSFFLYSKLTVDKSRWQQGNVFSCMVMHEALHLAFTQKSLSLSPGK

SEQ ID NO: 723 - protein, 248 aa, Artificial
  Synthetic
CNVNHKPSNTKVDKKVEPKSCDKTHTCPPCPAPELLGGPSVFLFPPKPKDTLLISRTPEVTCVVVDVSHEDPEVKFNWYVDGVEVHNAKTKPREEQYNSTYRVVSVLTVLHQDWLNGKEYKCKVSNKALPAPIEKTISKAKGQPREPQVYTLPPSRDELTKNQVSLTCLVKGFYPSDIAVEWLSNGQPENNYKTTPPVLDSDGSFFLYSKLTVDKSRWQQGNVFSCMVMHEALPLAFTQKSLSLSPGK

SEQ ID NO: 724 - protein, 248 aa, Artificial
  Synthetic
CNVNHKPSNTKVDKKVEPKSCDKTHTCPPCPAPELLGGPSVFLFPPKPKDTLLISRTPEVTCVVVDVSHEDPEVKFNWYVDGVEVHNAKTKPREEQYNSTYRVVSVLTVLHQDWLNGKEYKCKVSNKALPAPIEKTISKAKGQPREPQVYTLPPSRDELTKNQVSLTCLVKGFYPSDIAVEWLSGSQPENNYKTTPPVLDSDGSFFLYSKLTVDKSRWQQGNVFSCMVMHEALPLAFTQKSLSLSPGK

SEQ ID NO: 725 - protein, 248 aa, Artificial
  Synthetic
CNVNHKPSNTKVDKKVEPKSCDKTHTCPPCPAPELLGGPSVFLFPPKPKDTLLGSRTPEVTCVVVDVSHEDPEVKFNWYVDGVEVHNAKTKPREEQYNSTYRVVSVLTVLHQDWLNGKEYKCKVSNKALPAPIEKTISKAKGQPREPQVYTLPPSRDELTKNQVSLTCLVKGFYPSDIAVEWLSGSQPENNYKTTPPVLDSDGSFFLYSKLTVDKSRWQQGNVFSCMVMHEALPLAFTQKSLSLSPGK

SEQ ID NO: 726 - protein, 248 aa, Artificial
  Synthetic
CNVNHKPSNTKVDKKVEPKSCDKTHTCPPCPAPELLGGPSVFLFPPKPKDTLLISRTPEVTCVVVDVSHEDPEVKFNWYVDGVEVHNAKTKPREEQYNSTYRVVSVLTVLHQDWLNGKEYKCKVSNKALPAPIEKTISKAKGQPREPQVYTLPPSRDELTKNQVSLTCLVKGFYPSDIAVEWLSGSQPENNYKTTPPVLDSDGSFFLYSKLTVDKSRWQQGNVFSCMVMHEALPLHFTQKSLSLSPGK

SEQ ID NO: 727 - protein, 248 aa, Artificial
  Synthetic
CNVNHKPSNTKVDKKVEPKSCDKTHTCPPCPAPELLGGPSVFLFPPKPKDTLLGSRTPEVTCVVVDVSHEDPEVKFNWYVDGVEVHNAKTKPREEQYNSTYRVVSVLTVLHQDWLNGKEYKCKVSNKALPAPIEKTISKAKGQPREPQVYTLPPSRDELTKNQVSLTCLVKGFYPSDIAVEWESNGQPENNYKTTPPVLDSDGSFFLYSKLTVDKSRWQQGNVFSCSVMHEALHNHYTQKSLSLSPGK

SEQ ID NO: 728 - protein, 248 aa, Artificial
  Synthetic
CNVNHKPSNTKVDKKVEPKSCDKTHTCPPCPAPELLGGPSVFLFPPKPKDTLMISRTPEVTCVVVDVSHEDPEVKFNWYVDGVEVHNAKTKPREEQYNSTYRVVSVLTVLHQDWLNGKEYKCKVSNKALPAPIEKTISKAKGQPREPQVYTLPPSRDELTKNQVSLTCLVKGFYPSDIAVEWLSNGQPENNYKTTPPVLDSDGSFFLYSKLTVDKSRWQQGNVFSCMVMHEALHNHYTQKSLSLSPGK

SEQ ID NO: 729 - protein, 248 aa, Artificial
  Synthetic
CNVNHKPSNTKVDKKVEPKSCDKTHTCPPCPAPELLGGPSVFLFPPKPKDTLMISRTPEVTCVVVDVSHEDPEVKFNWYVDGVEVHNAKTKPREEQYNSTYRVVSVLTVLHQDWLNGKEYKCKVSNKALPAPIEKTISKAKGQPREPQVYTLPPSRDELTKNQVSLTCLVKGFYPSDIAVEWESGSQPENNYKTTPPVLDSDGSFFLYSKLTVDKSRWQQGNVFSCSVMHEALHNHYTQKSLSLSPGK

SEQ ID NO: 730 - protein, 248 aa, Artificial
  Synthetic
CNVNHKPSNTKVDKKVEPKSCDKTHTCPPCPAPELLGGPSVFLFPPKPKDTLMISRTPEVTCVVVDVSHEDPEVKFNWYVDGVEVHNAKTKPREEQYNSTYRVVSVLTVLHQDWLNGKEYKCKVSNKALPAPIEKTISKAKGQPREPQVYTLPPSRDELTKNQVSLTCLVKGFYPSDIAVEWESNGQPENNYKTTPPVLDSDGSFFLYSKLTVDKSRWQQGNVFSCSVMHEALPNHYTQKSLSLSPGK

SEQ ID NO: 731 - protein, 248 aa, Artificial
  Synthetic
CNVNHKPSNTKVDKKVEPKSCDKTHTCPPCPAPELLGGPSVFLFPPKPKDTLMISRTPEVTCVVVDVSHEDPEVKFNWYVDGVEVHNAKTKPREEQYNSTYRVVSVLTVLHQDWLNGKEYKCKVSNKALPAPIEKTISKAKGQPREPQVYTLPPSRDELTKNQVSLTCLVKGFYPSDIAVEWESNGQPENNYKTTPPVLDSDGSFFLYSKLTVDKSRWQQGNVFSCSVMHEALHNAYTQKSLSLSPGK

SEQ ID NO: 732 - protein, 248 aa, Artificial
  Synthetic
CNVNHKPSNTKVDKKVEPKSCDKTHTCPPCPAPELLGGPSVFLFPPKPKDTLMGSRTPEVTCVVVDVSHEDPEVKFNWYVDGVEVHNAKTKPREEQYNSTYRVVSVLTVLHQDWLNGKEYKCKVSNKALPAPIEKTISKAKGQPREPQVYTLPPSRDELTKNQVSLTCLVKGFYPSDIAVEWESNGQPENNYKTTPPVLDSDGSFFLYSKLTVDKSRWQQGNVFSCSVMHEALHNHYTQKSLSLSPGK

SEQ ID NO: 733 - protein, 248 aa, Artificial
  Synthetic
CNVNHKPSNTKVDKKVEPKSCDKTHTCPPCPAEELLGGPSVFLFPPKPKDTLMISRTPEVTCVVVDVSHEDPEVKFNWYVDGVEVHNAKTKPREEQYNSTYRVVSVLTVLHQDWLNGKEYKCKVSNKALPAPIEKTISKAKGQPREPQVYTLPPSRDELTKNQVSLTCLVKGFYPSDIAVEWESNGQPENNYKTTPPVLDSDGSFFLYSKLTVDKSRWQQGNVFSCSVMHEALHNHYTQKSLSLSPGK

SEQ ID NO: 734 - protein, 248 aa, Artificial
  Synthetic
CNVNHKPSNTKVDKKVEPKSCDKTHTCPPCPAKELLGGPSVFLFPPKPKDTLMISRTPEVTCVVVDVSHEDPEVKFNWYVDGVEVHNAKTKPREEQYNSTYRVVSVLTVLHQDWLNGKEYKCKVSNKALPAPIEKTISKAKGQPREPQVYTLPPSRDELTKNQVSLTCLVKGFYPSDIAVEWESNGQPENNYKTTPPVLDSDGSFFLYSKLTVDKSRWQQGNVFSCSVMHEALHNHYTQKSLSLSPGK

SEQ ID NO: 735 - protein, 248 aa, Artificial
  Synthetic
CNVNHKPSNTKVDKKVEPKSCDKTHTCPPCPAYELLGGPSVFLFPPKPKDTLMISRTPEVTCVVVDVSHEDPEVKFNWYVDGVEVHNAKTKPREEQYNSTYRVVSVLTVLHQDWLNGKEYKCKVSNKALPAPIEKTISKAKGQPREPQVYTLPPSRDELTKNQVSLTCLVKGFYPSDIAVEWESNGQPENNYKTTPPVLDSDGSFFLYSKLTVDKSRWQQGNVFSCSVMHEALHNHYTQKSLSLSPGK

SEQ ID NO: 736 - protein, 248 aa, Artificial
  Synthetic
CNVNHKPSNTKVDKKVEPKSCDKTHTCPPCPAGELLGGPSVFLFPPKPKDTLMISRTPEVTCVVVDVSHEDPEVKFNWYVDGVEVHNAKTKPREEQYNSTYRVVSVLTVLHQDWLNGKEYKCKVSNKALPAPIEKTISKAKGQPREPQVYTLPPSRDELTKNQVSLTCLVKGFYPSDIAVEWESNGQPENNYKTTPPVLDSDGSFFLYSKLTVDKSRWQQGNVFSCSVMHEALHNHYTQKSLSLSPGK

SEQ ID NO: 737 - protein, 248 aa, Artificial
  Synthetic
CNVNHKPSNTKVDKKVEPKSCDKTHTCPPCPAPELLGGPQVFLFPPKPKDTLMISRTPEVTCVVVDVSHEDPEVKFNWYVDGVEVHNAKTKPREEQYNSTYRVVSVLTVLHQDWLNGKEYKCKVSNKALPAPIEKTISKAKGQPREPQVYTLPPSRDELTKNQVSLTCLVKGFYPSDIAVEWESNGQPENNYKTTPPVLDSDGSFFLYSKLTVDKSRWQQGNVFSCSVMHEALHNHYTQKSLSLSPGK

SEQ ID NO: 738 - protein, 248 aa, Artificial
  Synthetic
CNVNHKPSNTKVDKKVEPKSCDKTHTCPPCPAPELLGGPKVFLFPPKPKDTLMISRTPEVTCVVVDVSHEDPEVKFNWYVDGVEVHNAKTKPREEQYNSTYRVVSVLTVLHQDWLNGKEYKCKVSNKALPAPIEKTISKAKGQPREPQVYTLPPSRDELTKNQVSLTCLVKGFYPSDIAVEWESNGQPENNYKTTPPVLDSDGSFFLYSKLTVDKSRWQQGNVFSCSVMHEALHNHYTQKSLSLSPGK

SEQ ID NO: 739 - protein, 248 aa, Artificial
  Synthetic
CNVNHKPSNTKVDKKVEPKSCDKTHTCPPCPAPELLGGPRVFLFPPKPKDTLMISRTPEVTCVVVDVSHEDPEVKFNWYVDGVEVHNAKTKPREEQYNSTYRVVSVLTVLHQDWLNGKEYKCKVSNKALPAPIEKTISKAKGQPREPQVYTLPPSRDELTKNQVSLTCLVKGFYPSDIAVEWESNGQPENNYKTTPPVLDSDGSFFLYSKLTVDKSRWQQGNVFSCSVMHEALHNHYTQKSLSLSPGK

SEQ ID NO: 740 - protein, 248 aa, Artificial
  Synthetic
CNVNHKPSNTKVDKKVEPKSCDKTHTCPPCPAPELLGGPVVFLFPPKPKDTLMISRTPEVTCVVVDVSHEDPEVKFNWYVDGVEVHNAKTKPREEQYNSTYRVVSVLTVLHQDWLNGKEYKCKVSNKALPAPIEKTISKAKGQPREPQVYTLPPSRDELTKNQVSLTCLVKGFYPSDIAVEWESNGQPENNYKTTPPVLDSDGSFFLYSKLTVDKSRWQQGNVFSCSVMHEALHNHYTQKSLSLSPGK

SEQ ID NO: 741 - protein, 248 aa, Artificial
  Synthetic
CNVNHKPSNTKVDKKVEPKSCDKTHTCPPCPAPELLGGPLVFLFPPKPKDTLMISRTPEVTCVVVDVSHEDPEVKFNWYVDGVEVHNAKTKPREEQYNSTYRVVSVLTVLHQDWLNGKEYKCKVSNKALPAPIEKTISKAKGQPREPQVYTLPPSRDELTKNQVSLTCLVKGFYPSDIAVEWESNGQPENNYKTTPPVLDSDGSFFLYSKLTVDKSRWQQGNVFSCSVMHEALHNHYTQKSLSLSPGK

SEQ ID NO: 742 - protein, 248 aa, Artificial
  Synthetic
CNVNHKPSNTKVDKKVEPKSCDKTHTCPPCPAPELLGGPIVFLFPPKPKDTLMISRTPEVTCVVVDVSHEDPEVKFNWYVDGVEVHNAKTKPREEQYNSTYRVVSVLTVLHQDWLNGKEYKCKVSNKALPAPIEKTISKAKGQPREPQVYTLPPSRDELTKNQVSLTCLVKGFYPSDIAVEWESNGQPENNYKTTPPVLDSDGSFFLYSKLTVDKSRWQQGNVFSCSVMHEALHNHYTQKSLSLSPGK

SEQ ID NO: 743 - protein, 248 aa, Artificial
  Synthetic
CNVNHKPSNTKVDKKVEPKSCDKTHTCPPCPAPELLGGPMVFLFPPKPKDTLMISRTPEVTCVVVDVSHEDPEVKFNWYVDGVEVHNAKTKPREEQYNSTYRVVSVLTVLHQDWLNGKEYKCKVSNKALPAPIEKTISKAKGQPREPQVYTLPPSRDELTKNQVSLTCLVKGFYPSDIAVEWESNGQPENNYKTTPPVLDSDGSFFLYSKLTVDKSRWQQGNVFSCSVMHEALHNHYTQKSLSLSPGK

SEQ ID NO: 744 - protein, 248 aa, Artificial
  Synthetic
CNVNHKPSNTKVDKKVEPKSCDKTHTCPPCPAPELLGGPWVFLFPPKPKDTLMISRTPEVTCVVVDVSHEDPEVKFNWYVDGVEVHNAKTKPREEQYNSTYRVVSVLTVLHQDWLNGKEYKCKVSNKALPAPIEKTISKAKGQPREPQVYTLPPSRDELTKNQVSLTCLVKGFYPSDIAVEWESNGQPENNYKTTPPVLDSDGSFFLYSKLTVDKSRWQQGNVFSCSVMHEALHNHYTQKSLSLSPGK

SEQ ID NO: 745 - protein, 248 aa, Artificial
  Synthetic
CNVNHKPSNTKVDKKVEPKSCDKTHTCPPCPAPELLGGPPVFLFPPKPKDTLMISRTPEVTCVVVDVSHEDPEVKFNWYVDGVEVHNAKTKPREEQYNSTYRVVSVLTVLHQDWLNGKEYKCKVSNKALPAPIEKTISKAKGQPREPQVYTLPPSRDELTKNQVSLTCLVKGFYPSDIAVEWESNGQPENNYKTTPPVLDSDGSFFLYSKLTVDKSRWQQGNVFSCSVMHEALHNHYTQKSLSLSPGK

SEQ ID NO: 746 - protein, 248 aa, Artificial
  Synthetic
CNVNHKPSNTKVDKKVEPKSCDKTHTCPPCPAPELLGGPGVFLFPPKPKDTLMISRTPEVTCVVVDVSHEDPEVKFNWYVDGVEVHNAKTKPREEQYNSTYRVVSVLTVLHQDWLNGKEYKCKVSNKALPAPIEKTISKAKGQPREPQVYTLPPSRDELTKNQVSLTCLVKGFYPSDIAVEWESNGQPENNYKTTPPVLDSDGSFFLYSKLTVDKSRWQQGNVFSCSVMHEALHNHYTQKSLSLSPGK

SEQ ID NO: 747 - protein, 248 aa, Artificial
  Synthetic
CNVNHKPSNTKVDKKVEPKSCDKTHTCPPCPAPELLGGPSVDLFPPKPKDTLMISRTPEVTCVVVDVSHEDPEVKFNWYVDGVEVHNAKTKPREEQYNSTYRVVSVLTVLHQDWLNGKEYKCKVSNKALPAPIEKTISKAKGQPREPQVYTLPPSRDELTKNQVSLTCLVKGFYPSDIAVEWESNGQPENNYKTTPPVLDSDGSFFLYSKLTVDKSRWQQGNVFSCSVMHEALHNHYTQKSLSLSPGK

SEQ ID NO: 748 - protein, 248 aa, Artificial
  Synthetic
CNVNHKPSNTKVDKKVEPKSCDKTHTCPPCPAPELLGGPSVELFPPKPKDTLMISRTPEVTCVVVDVSHEDPEVKFNWYVDGVEVHNAKTKPREEQYNSTYRVVSVLTVLHQDWLNGKEYKCKVSNKALPAPIEKTISKAKGQPREPQVYTLPPSRDELTKNQVSLTCLVKGFYPSDIAVEWESNGQPENNYKTTPPVLDSDGSFFLYSKLTVDKSRWQQGNVFSCSVMHEALHNHYTQKSLSLSPGK

SEQ ID NO: 749 - protein, 248 aa, Artificial
  Synthetic
CNVNHKPSNTKVDKKVEPKSCDKTHTCPPCPAPELLGGPSVYLFPPKPKDTLMISRTPEVTCVVVDVSHEDPEVKFNWYVDGVEVHNAKTKPREEQYNSTYRVVSVLTVLHQDWLNGKEYKCKVSNKALPAPIEKTISKAKGQPREPQVYTLPPSRDELTKNQVSLTCLVKGFYPSDIAVEWESNGQPENNYKTTPPVLDSDGSFFLYSKLTVDKSRWQQGNVFSCSVMHEALHNHYTQKSLSLSPGK

SEQ ID NO: 750 - protein, 248 aa, Artificial
  Synthetic
CNVNHKPSNTKVDKKVEPKSCDKTHTCPPCPAPELLGGPSVFLFPPKPKDTLMISRTPEVTCVVVDVEHEDPEVKFNWYVDGVEVHNAKTKPREEQYNSTYRVVSVLTVLHQDWLNGKEYKCKVSNKALPAPIEKTISKAKGQPREPQVYTLPPSRDELTKNQVSLTCLVKGFYPSDIAVEWESNGQPENNYKTTPPVLDSDGSFFLYSKLTVDKSRWQQGNVFSCSVMHEALHNHYTQKSLSLSPGK

SEQ ID NO: 751 - protein, 248 aa, Artificial
  Synthetic
CNVNHKPSNTKVDKKVEPKSCDKTHTCPPCPAPELLGGPSVFLFPPKPKDTLMISRTPEVTCVVVDVQHEDPEVKFNWYVDGVEVHNAKTKPREEQYNSTYRVVSVLTVLHQDWLNGKEYKCKVSNKALPAPIEKTISKAKGQPREPQVYTLPPSRDELTKNQVSLTCLVKGFYPSDIAVEWESNGQPENNYKTTPPVLDSDGSFFLYSKLTVDKSRWQQGNVFSCSVMHEALHNHYTQKSLSLSPGK

SEQ ID NO: 752 - protein, 248 aa, Artificial
  Synthetic
CNVNHKPSNTKVDKKVEPKSCDKTHTCPPCPAPELLGGPSVFLFPPKPKDTLMISRTPEVTCVVVDVKHEDPEVKFNWYVDGVEVHNAKTKPREEQYNSTYRVVSVLTVLHQDWLNGKEYKCKVSNKALPAPIEKTISKAKGQPREPQVYTLPPSRDELTKNQVSLTCLVKGFYPSDIAVEWESNGQPENNYKTTPPVLDSDGSFFLYSKLTVDKSRWQQGNVFSCSVMHEALHNHYTQKSLSLSPGK

SEQ ID NO: 753 - protein, 248 aa, Artificial
  Synthetic
CNVNHKPSNTKVDKKVEPKSCDKTHTCPPCPAPELLGGPSVFLFPPKPKDTLMISRTPEVTCVVVDVRHEDPEVKFNWYVDGVEVHNAKTKPREEQYNSTYRVVSVLTVLHQDWLNGKEYKCKVSNKALPAPIEKTISKAKGQPREPQVYTLPPSRDELTKNQVSLTCLVKGFYPSDIAVEWESNGQPENNYKTTPPVLDSDGSFFLYSKLTVDKSRWQQGNVFSCSVMHEALHNHYTQKSLSLSPGK

SEQ ID NO: 754 - protein, 248 aa, Artificial
  Synthetic
CNVNHKPSNTKVDKKVEPKSCDKTHTCPPCPAPELLGGPSVFLFPPKPKDTLMISRTPEVTCVVVDVVHEDPEVKFNWYVDGVEVHNAKTKPREEQYNSTYRVVSVLTVLHQDWLNGKEYKCKVSNKALPAPIEKTISKAKGQPREPQVYTLPPSRDELTKNQVSLTCLVKGFYPSDIAVEWESNGQPENNYKTTPPVLDSDGSFFLYSKLTVDKSRWQQGNVFSCSVMHEALHNHYTQKSLSLSPGK

SEQ ID NO: 755 - protein, 248 aa, Artificial
  Synthetic
CNVNHKPSNTKVDKKVEPKSCDKTHTCPPCPAPELLGGPSVFLFPPKPKDTLMISRTPEVTCVVVDVLHEDPEVKFNWYVDGVEVHNAKTKPREEQYNSTYRVVSVLTVLHQDWLNGKEYKCKVSNKALPAPIEKTISKAKGQPREPQVYTLPPSRDELTKNQVSLTCLVKGFYPSDIAVEWESNGQPENNYKTTPPVLDSDGSFFLYSKLTVDKSRWQQGNVFSCSVMHEALHNHYTQKSLSLSPGK

SEQ ID NO: 756 - protein, 248 aa, Artificial
  Synthetic
CNVNHKPSNTKVDKKVEPKSCDKTHTCPPCPAPELLGGPSVFLFPPKPKDTLMISRTPEVTCVVVDVIHEDPEVKFNWYVDGVEVHNAKTKPREEQYNSTYRVVSVLTVLHQDWLNGKEYKCKVSNKALPAPIEKTISKAKGQPREPQVYTLPPSRDELTKNQVSLTCLVKGFYPSDIAVEWESNGQPENNYKTTPPVLDSDGSFFLYSKLTVDKSRWQQGNVFSCSVMHEALHNHYTQKSLSLSPGK

SEQ ID NO: 757 - protein, 248 aa, Artificial
  Synthetic
CNVNHKPSNTKVDKKVEPKSCDKTHTCPPCPAPELLGGPSVFLFPPKPKDTLMISRTPEVTCVVVDVFHEDPEVKFNWYVDGVEVHNAKTKPREEQYNSTYRVVSVLTVLHQDWLNGKEYKCKVSNKALPAPIEKTISKAKGQPREPQVYTLPPSRDELTKNQVSLTCLVKGFYPSDIAVEWESNGQPENNYKTTPPVLDSDGSFFLYSKLTVDKSRWQQGNVFSCSVMHEALHNHYTQKSLSLSPGK

SEQ ID NO: 758 - protein, 248 aa, Artificial
  Synthetic
CNVNHKPSNTKVDKKVEPKSCDKTHTCPPCPAPELLGGPSVFLFPPKPKDTLMISRTPEVTCVVVDVMHEDPEVKFNWYVDGVEVHNAKTKPREEQYNSTYRVVSVLTVLHQDWLNGKEYKCKVSNKALPAPIEKTISKAKGQPREPQVYTLPPSRDELTKNQVSLTCLVKGFYPSDIAVEWESNGQPENNYKTTPPVLDSDGSFFLYSKLTVDKSRWQQGNVFSCSVMHEALHNHYTQKSLSLSPGK

SEQ ID NO: 759 - protein, 248 aa, Artificial
  Synthetic
CNVNHKPSNTKVDKKVEPKSCDKTHTCPPCPAPELLGGPSVFLFPPKPKDTLMISRTPEVTCVVVDVYHEDPEVKFNWYVDGVEVHNAKTKPREEQYNSTYRVVSVLTVLHQDWLNGKEYKCKVSNKALPAPIEKTISKAKGQPREPQVYTLPPSRDELTKNQVSLTCLVKGFYPSDIAVEWESNGQPENNYKTTPPVLDSDGSFFLYSKLTVDKSRWQQGNVFSCSVMHEALHNHYTQKSLSLSPGK

SEQ ID NO: 760 - protein, 248 aa, Artificial
  Synthetic
CNVNHKPSNTKVDKKVEPKSCDKTHTCPPCPAPELLGGPSVFLFPPKPKDTLMISRTPEVTCVVVDVWHEDPEVKFNWYVDGVEVHNAKTKPREEQYNSTYRVVSVLTVLHQDWLNGKEYKCKVSNKALPAPIEKTISKAKGQPREPQVYTLPPSRDELTKNQVSLTCLVKGFYPSDIAVEWESNGQPENNYKTTPPVLDSDGSFFLYSKLTVDKSRWQQGNVFSCSVMHEALHNHYTQKSLSLSPGK

SEQ ID NO: 761 - protein, 248 aa, Artificial
  Synthetic
CNVNHKPSNTKVDKKVEPKSCDKTHTCPPCPAPELLGGPSVFLFPPKPKDTLMISRTPEVTCVVVDVPHEDPEVKFNWYVDGVEVHNAKTKPREEQYNSTYRVVSVLTVLHQDWLNGKEYKCKVSNKALPAPIEKTISKAKGQPREPQVYTLPPSRDELTKNQVSLTCLVKGFYPSDIAVEWESNGQPENNYKTTPPVLDSDGSFFLYSKLTVDKSRWQQGNVFSCSVMHEALHNHYTQKSLSLSPGK

SEQ ID NO: 762 - protein, 248 aa, Artificial
  Synthetic
CNVNHKPSNTKVDKKVEPKSCDKTHTCPPCPAPELLGGPSVFLFPPKPKDTLMISRTPEVTCVVVDVSDEDPEVKFNWYVDGVEVHNAKTKPREEQYNSTYRVVSVLTVLHQDWLNGKEYKCKVSNKALPAPIEKTISKAKGQPREPQVYTLPPSRDELTKNQVSLTCLVKGFYPSDIAVEWESNGQPENNYKTTPPVLDSDGSFFLYSKLTVDKSRWQQGNVFSCSVMHEALHNHYTQKSLSLSPGK

SEQ ID NO: 763 - protein, 248 aa, Artificial
  Synthetic
CNVNHKPSNTKVDKKVEPKSCDKTHTCPPCPAPELLGGPSVFLFPPKPKDTLMISRTPEVTCVVVDVSEEDPEVKFNWYVDGVEVHNAKTKPREEQYNSTYRVVSVLTVLHQDWLNGKEYKCKVSNKALPAPIEKTISKAKGQPREPQVYTLPPSRDELTKNQVSLTCLVKGFYPSDIAVEWESNGQPENNYKTTPPVLDSDGSFFLYSKLTVDKSRWQQGNVFSCSVMHEALHNHYTQKSLSLSPGK

SEQ ID NO: 764 - protein, 248 aa, Artificial
  Synthetic
CNVNHKPSNTKVDKKVEPKSCDKTHTCPPCPAPELLGGPSVFLFPPKPKDTLMISRTPEVTCVVVDVSQEDPEVKFNWYVDGVEVHNAKTKPREEQYNSTYRVVSVLTVLHQDWLNGKEYKCKVSNKALPAPIEKTISKAKGQPREPQVYTLPPSRDELTKNQVSLTCLVKGFYPSDIAVEWESNGQPENNYKTTPPVLDSDGSFFLYSKLTVDKSRWQQGNVFSCSVMHEALHNHYTQKSLSLSPGK

SEQ ID NO: 765 - protein, 248 aa, Artificial
  Synthetic
CNVNHKPSNTKVDKKVEPKSCDKTHTCPPCPAPELLGGPSVFLFPPKPKDTLMISRTPEVTCVVVDVSKEDPEVKFNWYVDGVEVHNAKTKPREEQYNSTYRVVSVLTVLHQDWLNGKEYKCKVSNKALPAPIEKTISKAKGQPREPQVYTLPPSRDELTKNQVSLTCLVKGFYPSDIAVEWESNGQPENNYKTTPPVLDSDGSFFLYSKLTVDKSRWQQGNVFSCSVMHEALHNHYTQKSLSLSPGK

SEQ ID NO: 766 - protein, 248 aa, Artificial
  Synthetic
CNVNHKPSNTKVDKKVEPKSCDKTHTCPPCPAPELLGGPSVFLFPPKPKDTLMISRTPEVTCVVVDVSREDPEVKFNWYVDGVEVHNAKTKPREEQYNSTYRVVSVLTVLHQDWLNGKEYKCKVSNKALPAPIEKTISKAKGQPREPQVYTLPPSRDELTKNQVSLTCLVKGFYPSDIAVEWESNGQPENNYKTTPPVLDSDGSFFLYSKLTVDKSRWQQGNVFSCSVMHEALHNHYTQKSLSLSPGK

SEQ ID NO: 767 - protein, 248 aa, Artificial
  Synthetic
CNVNHKPSNTKVDKKVEPKSCDKTHTCPPCPAPELLGGPSVFLFPPKPKDTLMISRTPEVTCVVVDVSTEDPEVKFNWYVDGVEVHNAKTKPREEQYNSTYRVVSVLTVLHQDWLNGKEYKCKVSNKALPAPIEKTISKAKGQPREPQVYTLPPSRDELTKNQVSLTCLVKGFYPSDIAVEWESNGQPENNYKTTPPVLDSDGSFFLYSKLTVDKSRWQQGNVFSCSVMHEALHNHYTQKSLSLSPGK

SEQ ID NO: 768 - protein, 248 aa, Artificial
  Synthetic
CNVNHKPSNTKVDKKVEPKSCDKTHTCPPCPAPELLGGPSVFLFPPKPKDTLMISRTPEVTCVVVDVSVEDPEVKFNWYVDGVEVHNAKTKPREEQYNSTYRVVSVLTVLHQDWLNGKEYKCKVSNKALPAPIEKTISKAKGQPREPQVYTLPPSRDELTKNQVSLTCLVKGFYPSDIAVEWESNGQPENNYKTTPPVLDSDGSFFLYSKLTVDKSRWQQGNVFSCSVMHEALHNHYTQKSLSLSPGK

SEQ ID NO: 769 - protein, 248 aa, Artificial
  Synthetic
CNVNHKPSNTKVDKKVEPKSCDKTHTCPPCPAPELLGGPSVFLFPPKPKDTLMISRTPEVTCVVVDVSLEDPEVKFNWYVDGVEVHNAKTKPREEQYNSTYRVVSVLTVLHQDWLNGKEYKCKVSNKALPAPIEKTISKAKGQPREPQVYTLPPSRDELTKNQVSLTCLVKGFYPSDIAVEWESNGQPENNYKTTPPVLDSDGSFFLYSKLTVDKSRWQQGNVFSCSVMHEALHNHYTQKSLSLSPGK

SEQ ID NO: 770 - protein, 248 aa, Artificial
  Synthetic
CNVNHKPSNTKVDKKVEPKSCDKTHTCPPCPAPELLGGPSVFLFPPKPKDTLMISRTPEVTCVVVDVSIEDPEVKFNWYVDGVEVHNAKTKPREEQYNSTYRVVSVLTVLHQDWLNGKEYKCKVSNKALPAPIEKTISKAKGQPREPQVYTLPPSRDELTKNQVSLTCLVKGFYPSDIAVEWESNGQPENNYKTTPPVLDSDGSFFLYSKLTVDKSRWQQGNVFSCSVMHEALHNHYTQKSLSLSPGK

SEQ ID NO: 771 - protein, 248 aa, Artificial
  Synthetic
CNVNHKPSNTKVDKKVEPKSCDKTHTCPPCPAPELLGGPSVFLFPPKPKDTLMISRTPEVTCVVVDVSFEDPEVKFNWYVDGVEVHNAKTKPREEQYNSTYRVVSVLTVLHQDWLNGKEYKCKVSNKALPAPIEKTISKAKGQPREPQVYTLPPSRDELTKNQVSLTCLVKGFYPSDIAVEWESNGQPENNYKTTPPVLDSDGSFFLYSKLTVDKSRWQQGNVFSCSVMHEALHNHYTQKSLSLSPGK

SEQ ID NO: 772 - protein, 248 aa, Artificial
  Synthetic
CNVNHKPSNTKVDKKVEPKSCDKTHTCPPCPAPELLGGPSVFLFPPKPKDTLMISRTPEVTCVVVDVSMEDPEVKFNWYVDGVEVHNAKTKPREEQYNSTYRVVSVLTVLHQDWLNGKEYKCKVSNKALPAPIEKTISKAKGQPREPQVYTLPPSRDELTKNQVSLTCLVKGFYPSDIAVEWESNGQPENNYKTTPPVLDSDGSFFLYSKLTVDKSRWQQGNVFSCSVMHEALHNHYTQKSLSLSPGK

SEQ ID NO: 773 - protein, 248 aa, Artificial
  Synthetic
CNVNHKPSNTKVDKKVEPKSCDKTHTCPPCPAPELLGGPSVFLFPPKPKDTLMISRTPEVTCVVVDVSWEDPEVKFNWYVDGVEVHNAKTKPREEQYNSTYRVVSVLTVLHQDWLNGKEYKCKVSNKALPAPIEKTISKAKGQPREPQVYTLPPSRDELTKNQVSLTCLVKGFYPSDIAVEWESNGQPENNYKTTPPVLDSDGSFFLYSKLTVDKSRWQQGNVFSCSVMHEALHNHYTQKSLSLSPGK

SEQ ID NO: 774 - protein, 248 aa, Artificial
  Synthetic
CNVNHKPSNTKVDKKVEPKSCDKTHTCPPCPAPELLGGPSVFLFPPKPKDTLMISRTPEVTCVVVDVSPEDPEVKFNWYVDGVEVHNAKTKPREEQYNSTYRVVSVLTVLHQDWLNGKEYKCKVSNKALPAPIEKTISKAKGQPREPQVYTLPPSRDELTKNQVSLTCLVKGFYPSDIAVEWESNGQPENNYKTTPPVLDSDGSFFLYSKLTVDKSRWQQGNVFSCSVMHEALHNHYTQKSLSLSPGK

SEQ ID NO: 775 - protein, 248 aa, Artificial
  Synthetic
CNVNHKPSNTKVDKKVEPKSCDKTHTCPPCPAPELLGGPSVFLFPPKPKDTLMISRTPEVTCVVVDVSGEDPEVKFNWYVDGVEVHNAKTKPREEQYNSTYRVVSVLTVLHQDWLNGKEYKCKVSNKALPAPIEKTISKAKGQPREPQVYTLPPSRDELTKNQVSLTCLVKGFYPSDIAVEWESNGQPENNYKTTPPVLDSDGSFFLYSKLTVDKSRWQQGNVFSCSVMHEALHNHYTQKSLSLSPGK

SEQ ID NO: 776 - protein, 248 aa, Artificial
  Synthetic
CNVNHKPSNTKVDKKVEPKSCDKTHTCPPCPAPELLGGPSVFLFPPKPKDTLMISRTPEVTCVVVDVSHEDPEVKFNWYVDGVEVHNAKTKPREEQYNDTYRVVSVLTVLHQDWLNGKEYKCKVSNKALPAPIEKTISKAKGQPREPQVYTLPPSRDELTKNQVSLTCLVKGFYPSDIAVEWESNGQPENNYKTTPPVLDSDGSFFLYSKLTVDKSRWQQGNVFSCSVMHEALHNHYTQKSLSLSPGK

SEQ ID NO: 777 - protein, 248 aa, Artificial
  Synthetic
CNVNHKPSNTKVDKKVEPKSCDKTHTCPPCPAPELLGGPSVFLFPPKPKDTLMISRTPEVTCVVVDVSHEDPEVKFNWYVDGVEVHNAKTKPREEQYNETYRVVSVLTVLHQDWLNGKEYKCKVSNKALPAPIEKTISKAKGQPREPQVYTLPPSRDELTKNQVSLTCLVKGFYPSDIAVEWESNGQPENNYKTTPPVLDSDGSFFLYSKLTVDKSRWQQGNVFSCSVMHEALHNHYTQKSLSLSPGK

SEQ ID NO: 778 - protein, 248 aa, Artificial
  Synthetic
CNVNHKPSNTKVDKKVEPKSCDKTHTCPPCPAPELLGGPSVFLFPPKPKDTLMISRTPEVTCVVVDVSHEDPEVKFNWYVDGVEVHNAKTKPREEQYNQTYRVVSVLTVLHQDWLNGKEYKCKVSNKALPAPIEKTISKAKGQPREPQVYTLPPSRDELTKNQVSLTCLVKGFYPSDIAVEWESNGQPENNYKTTPPVLDSDGSFFLYSKLTVDKSRWQQGNVFSCSVMHEALHNHYTQKSLSLSPGK

SEQ ID NO: 779 - protein, 248 aa, Artificial
  Synthetic
CNVNHKPSNTKVDKKVEPKSCDKTHTCPPCPAPELLGGPSVFLFPPKPKDTLMISRTPEVTCVVVDVSHEDPEVKFNWYVDGVEVHNAKTKPREEQYNKTYRVVSVLTVLHQDWLNGKEYKCKVSNKALPAPIEKTISKAKGQPREPQVYTLPPSRDELTKNQVSLTCLVKGFYPSDIAVEWESNGQPENNYKTTPPVLDSDGSFFLYSKLTVDKSRWQQGNVFSCSVMHEALHNHYTQKSLSLSPGK

SEQ ID NO: 780 - protein, 248 aa, Artificial
  Synthetic
CNVNHKPSNTKVDKKVEPKSCDKTHTCPPCPAPELLGGPSVFLFPPKPKDTLMISRTPEVTCVVVDVSHEDPEVKFNWYVDGVEVHNAKTKPREEQYNRTYRVVSVLTVLHQDWLNGKEYKCKVSNKALPAPIEKTISKAKGQPREPQVYTLPPSRDELTKNQVSLTCLVKGFYPSDIAVEWESNGQPENNYKTTPPVLDSDGSFFLYSKLTVDKSRWQQGNVFSCSVMHEALHNHYTQKSLSLSPGK

SEQ ID NO: 781 - protein, 248 aa, Artificial
  Synthetic
CNVNHKPSNTKVDKKVEPKSCDKTHTCPPCPAPELLGGPSVFLFPPKPKDTLMISRTPEVTCVVVDVSHEDPEVKFNWYVDGVEVHNAKTKPREEQYNITYRVVSVLTVLHQDWLNGKEYKCKVSNKALPAPIEKTISKAKGQPREPQVYTLPPSRDELTKNQVSLTCLVKGFYPSDIAVEWESNGQPENNYKTTPPVLDSDGSFFLYSKLTVDKSRWQQGNVFSCSVMHEALHNHYTQKSLSLSPGK

SEQ ID NO: 782 - protein, 248 aa, Artificial
  Synthetic
CNVNHKPSNTKVDKKVEPKSCDKTHTCPPCPAPELLGGPSVFLFPPKPKDTLMISRTPEVTCVVVDVSHEDPEVKFNWYVDGVEVHNAKTKPREEQYNFTYRVVSVLTVLHQDWLNGKEYKCKVSNKALPAPIEKTISKAKGQPREPQVYTLPPSRDELTKNQVSLTCLVKGFYPSDIAVEWESNGQPENNYKTTPPVLDSDGSFFLYSKLTVDKSRWQQGNVFSCSVMHEALHNHYTQKSLSLSPGK

SEQ ID NO: 783 - protein, 248 aa, Artificial
  Synthetic
CNVNHKPSNTKVDKKVEPKSCDKTHTCPPCPAPELLGGPSVFLFPPKPKDTLMISRTPEVTCVVVDVSHEDPEVKFNWYVDGVEVHNAKTKPREEQYNMTYRVVSVLTVLHQDWLNGKEYKCKVSNKALPAPIEKTISKAKGQPREPQVYTLPPSRDELTKNQVSLTCLVKGFYPSDIAVEWESNGQPENNYKTTPPVLDSDGSFFLYSKLTVDKSRWQQGNVFSCSVMHEALHNHYTQKSLSLSPGK

SEQ ID NO: 784 - protein, 248 aa, Artificial
  Synthetic
CNVNHKPSNTKVDKKVEPKSCDKTHTCPPCPAPELLGGPSVFLFPPKPKDTLMISRTPEVTCVVVDVSHEDPEVKFNWYVDGVEVHNAKTKPREEQYNYTYRVVSVLTVLHQDWLNGKEYKCKVSNKALPAPIEKTISKAKGQPREPQVYTLPPSRDELTKNQVSLTCLVKGFYPSDIAVEWESNGQPENNYKTTPPVLDSDGSFFLYSKLTVDKSRWQQGNVFSCSVMHEALHNHYTQKSLSLSPGK

SEQ ID NO: 785 - protein, 248 aa, Artificial
  Synthetic
CNVNHKPSNTKVDKKVEPKSCDKTHTCPPCPAPELLGGPSVFLFPPKPKDTLMISRTPEVTCVVVDVSHEDPEVKFNWYVDGVEVHNAKTKPREEQYNWTYRVVSVLTVLHQDWLNGKEYKCKVSNKALPAPIEKTISKAKGQPREPQVYTLPPSRDELTKNQVSLTCLVKGFYPSDIAVEWESNGQPENNYKTTPPVLDSDGSFFLYSKLTVDKSRWQQGNVFSCSVMHEALHNHYTQKSLSLSPGK

SEQ ID NO: 786 - protein, 248 aa, Artificial
  Synthetic
CNVNHKPSNTKVDKKVEPKSCDKTHTCPPCPAPELLGGPSVFLFPPKPKDTLMISRTPEVTCVVVDVSHEDPEVKFNWYVDGVEVHNAKTKPREEQYNSDYRVVSVLTVLHQDWLNGKEYKCKVSNKALPAPIEKTISKAKGQPREPQVYTLPPSRDELTKNQVSLTCLVKGFYPSDIAVEWESNGQPENNYKTTPPVLDSDGSFFLYSKLTVDKSRWQQGNVFSCSVMHEALHNHYTQKSLSLSPGK

SEQ ID NO: 787 - protein, 248 aa, Artificial
  Synthetic
CNVNHKPSNTKVDKKVEPKSCDKTHTCPPCPAPELLGGPSVFLFPPKPKDTLMISRTPEVTCVVVDVSHEDPEVKFNWYVDGVEVHNAKTKPREEQYNSEYRVVSVLTVLHQDWLNGKEYKCKVSNKALPAPIEKTISKAKGQPREPQVYTLPPSRDELTKNQVSLTCLVKGFYPSDIAVEWESNGQPENNYKTTPPVLDSDGSFFLYSKLTVDKSRWQQGNVFSCSVMHEALHNHYTQKSLSLSPGK

SEQ ID NO: 788 - protein, 248 aa, Artificial
  Synthetic
CNVNHKPSNTKVDKKVEPKSCDKTHTCPPCPAPELLGGPSVFLFPPKPKDTLMISRTPEVTCVVVDVSHEDPEVKFNWYVDGVEVHNAKTKPREEQYNSNYRVVSVLTVLHQDWLNGKEYKCKVSNKALPAPIEKTISKAKGQPREPQVYTLPPSRDELTKNQVSLTCLVKGFYPSDIAVEWESNGQPENNYKTTPPVLDSDGSFFLYSKLTVDKSRWQQGNVFSCSVMHEALHNHYTQKSLSLSPGK

SEQ ID NO: 789 - protein, 248 aa, Artificial
  Synthetic
CNVNHKPSNTKVDKKVEPKSCDKTHTCPPCPAPELLGGPSVFLFPPKPKDTLMISRTPEVTCVVVDVSHEDPEVKFNWYVDGVEVHNAKTKPREEQYNSQYRVVSVLTVLHQDWLNGKEYKCKVSNKALPAPIEKTISKAKGQPREPQVYTLPPSRDELTKNQVSLTCLVKGFYPSDIAVEWESNGQPENNYKTTPPVLDSDGSFFLYSKLTVDKSRWQQGNVFSCSVMHEALHNHYTQKSLSLSPGK

SEQ ID NO: 790 - protein, 248 aa, Artificial
  Synthetic
CNVNHKPSNTKVDKKVEPKSCDKTHTCPPCPAPELLGGPSVFLFPPKPKDTLMISRTPEVTCVVVDVSHEDPEVKFNWYVDGVEVHNAKTKPREEQYNSKYRVVSVLTVLHQDWLNGKEYKCKVSNKALPAPIEKTISKAKGQPREPQVYTLPPSRDELTKNQVSLTCLVKGFYPSDIAVEWESNGQPENNYKTTPPVLDSDGSFFLYSKLTVDKSRWQQGNVFSCSVMHEALHNHYTQKSLSLSPGK

SEQ ID NO: 791 - protein, 248 aa, Artificial
  Synthetic
CNVNHKPSNTKVDKKVEPKSCDKTHTCPPCPAPELLGGPSVFLFPPKPKDTLMISRTPEVTCVVVDVSHEDPEVKFNWYVDGVEVHNAKTKPREEQYNSRYRVVSVLTVLHQDWLNGKEYKCKVSNKALPAPIEKTISKAKGQPREPQVYTLPPSRDELTKNQVSLTCLVKGFYPSDIAVEWESNGQPENNYKTTPPVLDSDGSFFLYSKLTVDKSRWQQGNVFSCSVMHEALHNHYTQKSLSLSPGK

SEQ ID NO: 792 - protein, 248 aa, Artificial
  Synthetic
CNVNHKPSNTKVDKKVEPKSCDKTHTCPPCPAPELLGGPSVFLFPPKPKDTLMISRTPEVTCVVVDVSHEDPEVKFNWYVDGVEVHNAKTKPREEQYNSLYRVVSVLTVLHQDWLNGKEYKCKVSNKALPAPIEKTISKAKGQPREPQVYTLPPSRDELTKNQVSLTCLVKGFYPSDIAVEWESNGQPENNYKTTPPVLDSDGSFFLYSKLTVDKSRWQQGNVFSCSVMHEALHNHYTQKSLSLSPGK

SEQ ID NO: 793 - protein, 248 aa, Artificial
  Synthetic
CNVNHKPSNTKVDKKVEPKSCDKTHTCPPCPAPELLGGPSVFLFPPKPKDTLMISRTPEVTCVVVDVSHEDPEVKFNWYVDGVEVHNAKTKPREEQYNSFYRVVSVLTVLHQDWLNGKEYKCKVSNKALPAPIEKTISKAKGQPREPQVYTLPPSRDELTKNQVSLTCLVKGFYPSDIAVEWESNGQPENNYKTTPPVLDSDGSFFLYSKLTVDKSRWQQGNVFSCSVMHEALHNHYTQKSLSLSPGK

SEQ ID NO: 794 - protein, 248 aa, Artificial
  Synthetic
CNVNHKPSNTKVDKKVEPKSCDKTHTCPPCPAPELLGGPSVFLFPPKPKDTLMISRTPEVTCVVVDVSHEDPEVKFNWYVDGVEVHNAKTKPREEQYNSMYRVVSVLTVLHQDWLNGKEYKCKVSNKALPAPIEKTISKAKGQPREPQVYTLPPSRDELTKNQVSLTCLVKGFYPSDIAVEWESNGQPENNYKTTPPVLDSDGSFFLYSKLTVDKSRWQQGNVFSCSVMHEALHNHYTQKSLSLSPGK

SEQ ID NO: 795 - protein, 248 aa, Artificial
  Synthetic
CNVNHKPSNTKVDKKVEPKSCDKTHTCPPCPAPELLGGPSVFLFPPKPKDTLMISRTPEVTCVVVDVSHEDPEVKFNWYVDGVEVHNAKTKPREEQYNSYYRVVSVLTVLHQDWLNGKEYKCKVSNKALPAPIEKTISKAKGQPREPQVYTLPPSRDELTKNQVSLTCLVKGFYPSDIAVEWESNGQPENNYKTTPPVLDSDGSFFLYSKLTVDKSRWQQGNVFSCSVMHEALHNHYTQKSLSLSPGK

SEQ ID NO: 796 - protein, 248 aa, Artificial
  Synthetic
CNVNHKPSNTKVDKKVEPKSCDKTHTCPPCPAPELLGGPSVFLFPPKPKDTLMISRTPEVTCVVVDVSHEDPEVKFNWYVDGVEVHNAKTKPREEQYNSWYRVVSVLTVLHQDWLNGKEYKCKVSNKALPAPIEKTISKAKGQPREPQVYTLPPSRDELTKNQVSLTCLVKGFYPSDIAVEWESNGQPENNYKTTPPVLDSDGSFFLYSKLTVDKSRWQQGNVFSCSVMHEALHNHYTQKSLSLSPGK

SEQ ID NO: 797 - protein, 248 aa, Artificial
  Synthetic
CNVNHKPSNTKVDKKVEPKSCDKTHTCPPCPAPELLGGPSVFLFPPKPKDTLMISRTPEVTCVVVDVSHEDPEVKFNWYVDGVEVHNAKTKPREEQYNSPYRVVSVLTVLHQDWLNGKEYKCKVSNKALPAPIEKTISKAKGQPREPQVYTLPPSRDELTKNQVSLTCLVKGFYPSDIAVEWESNGQPENNYKTTPPVLDSDGSFFLYSKLTVDKSRWQQGNVFSCSVMHEALHNHYTQKSLSLSPGK

SEQ ID NO: 798 - protein, 248 aa, Artificial
  Synthetic
CNVNHKPSNTKVDKKVEPKSCDKTHTCPPCPAPELLGGPSVFLFPPKPKDTLMISRTPEVTCVVVDVSHEDPEVKFNWYVDGVEVHNAKTKPREEQYNSGYRVVSVLTVLHQDWLNGKEYKCKVSNKALPAPIEKTISKAKGQPREPQVYTLPPSRDELTKNQVSLTCLVKGFYPSDIAVEWESNGQPENNYKTTPPVLDSDGSFFLYSKLTVDKSRWQQGNVFSCSVMHEALHNHYTQKSLSLSPGK

SEQ ID NO: 799 - protein, 248 aa, Artificial
  Synthetic
CNVNHKPSNTKVDKKVEPKSCDKTHTCPPCPAPELLGGPSVFLFPPKPKDTLMISRTPEVTCVVVDVSHEDPEVKFNWYVDGVEVHNAKTKPREEQYNSTDRVVSVLTVLHQDWLNGKEYKCKVSNKALPAPIEKTISKAKGQPREPQVYTLPPSRDELTKNQVSLTCLVKGFYPSDIAVEWESNGQPENNYKTTPPVLDSDGSFFLYSKLTVDKSRWQQGNVFSCSVMHEALHNHYTQKSLSLSPGK

SEQ ID NO: 800 - protein, 248 aa, Artificial
  Synthetic
CNVNHKPSNTKVDKKVEPKSCDKTHTCPPCPAPELLGGPSVFLFPPKPKDTLMISRTPEVTCVVVDVSHEDPEVKFNWYVDGVEVHNAKTKPREEQYNSTERVVSVLTVLHQDWLNGKEYKCKVSNKALPAPIEKTISKAKGQPREPQVYTLPPSRDELTKNQVSLTCLVKGFYPSDIAVEWESNGQPENNYKTTPPVLDSDGSFFLYSKLTVDKSRWQQGNVFSCSVMHEALHNHYTQKSLSLSPGK

SEQ ID NO: 801 - protein, 248 aa, Artificial
  Synthetic
CNVNHKPSNTKVDKKVEPKSCDKTHTCPPCPAPELLGGPSVFLFPPKPKDTLMISRTPEVTCVVVDVSHEDPEVKFNWYVDGVEVHNAKTKPREEQYNSTNRVVSVLTVLHQDWLNGKEYKCKVSNKALPAPIEKTISKAKGQPREPQVYTLPPSRDELTKNQVSLTCLVKGFYPSDIAVEWESNGQPENNYKTTPPVLDSDGSFFLYSKLTVDKSRWQQGNVFSCSVMHEALHNHYTQKSLSLSPGK

SEQ ID NO: 802 - protein, 248 aa, Artificial
  Synthetic
CNVNHKPSNTKVDKKVEPKSCDKTHTCPPCPAPELLGGPSVFLFPPKPKDTLMISRTPEVTCVVVDVSHEDPEVKFNWYVDGVEVHNAKTKPREEQYNSTQRVVSVLTVLHQDWLNGKEYKCKVSNKALPAPIEKTISKAKGQPREPQVYTLPPSRDELTKNQVSLTCLVKGFYPSDIAVEWESNGQPENNYKTTPPVLDSDGSFFLYSKLTVDKSRWQQGNVFSCSVMHEALHNHYTQKSLSLSPGK

SEQ ID NO: 803 - protein, 248 aa, Artificial
  Synthetic
CNVNHKPSNTKVDKKVEPKSCDKTHTCPPCPAPELLGGPSVFLFPPKPKDTLMISRTPEVTCVVVDVSHEDPEVKFNWYVDGVEVHNAKTKPREEQYNSTKRVVSVLTVLHQDWLNGKEYKCKVSNKALPAPIEKTISKAKGQPREPQVYTLPPSRDELTKNQVSLTCLVKGFYPSDIAVEWESNGQPENNYKTTPPVLDSDGSFFLYSKLTVDKSRWQQGNVFSCSVMHEALHNHYTQKSLSLSPGK

SEQ ID NO: 804 - protein, 248 aa, Artificial
  Synthetic
CNVNHKPSNTKVDKKVEPKSCDKTHTCPPCPAPELLGGPSVFLFPPKPKDTLMISRTPEVTCVVVDVSHEDPEVKFNWYVDGVEVHNAKTKPREEQYNSTRRVVSVLTVLHQDWLNGKEYKCKVSNKALPAPIEKTISKAKGQPREPQVYTLPPSRDELTKNQVSLTCLVKGFYPSDIAVEWESNGQPENNYKTTPPVLDSDGSFFLYSKLTVDKSRWQQGNVFSCSVMHEALHNHYTQKSLSLSPGK

SEQ ID NO: 805 - protein, 248 aa, Artificial
  Synthetic
CNVNHKPSNTKVDKKVEPKSCDKTHTCPPCPAPELLGGPSVFLFPPKPKDTLMISRTPEVTCVVVDVSHEDPEVKFNWYVDGVEVHNAKTKPREEQYNSTSRVVSVLTVLHQDWLNGKEYKCKVSNKALPAPIEKTISKAKGQPREPQVYTLPPSRDELTKNQVSLTCLVKGFYPSDIAVEWESNGQPENNYKTTPPVLDSDGSFFLYSKLTVDKSRWQQGNVFSCSVMHEALHNHYTQKSLSLSPGK

SEQ ID NO: 806 - protein, 248 aa, Artificial
  Synthetic
CNVNHKPSNTKVDKKVEPKSCDKTHTCPPCPAPELLGGPSVFLFPPKPKDTLMISRTPEVTCVVVDVSHEDPEVKFNWYVDGVEVHNAKTKPREEQYNSTTRVVSVLTVLHQDWLNGKEYKCKVSNKALPAPIEKTISKAKGQPREPQVYTLPPSRDELTKNQVSLTCLVKGFYPSDIAVEWESNGQPENNYKTTPPVLDSDGSFFLYSKLTVDKSRWQQGNVFSCSVMHEALHNHYTQKSLSLSPGK

SEQ ID NO: 807 - protein, 248 aa, Artificial
  Synthetic
CNVNHKPSNTKVDKKVEPKSCDKTHTCPPCPAPELLGGPSVFLFPPKPKDTLMISRTPEVTCVVVDVSHEDPEVKFNWYVDGVEVHNAKTKPREEQYNSTHRVVSVLTVLHQDWLNGKEYKCKVSNKALPAPIEKTISKAKGQPREPQVYTLPPSRDELTKNQVSLTCLVKGFYPSDIAVEWESNGQPENNYKTTPPVLDSDGSFFLYSKLTVDKSRWQQGNVFSCSVMHEALHNHYTQKSLSLSPGK

SEQ ID NO: 808 - protein, 248 aa, Artificial
  Synthetic
CNVNHKPSNTKVDKKVEPKSCDKTHTCPPCPAPELLGGPSVFLFPPKPKDTLMISRTPEVTCVVVDVSHEDPEVKFNWYVDGVEVHNAKTKPREEQYNSTARVVSVLTVLHQDWLNGKEYKCKVSNKALPAPIEKTISKAKGQPREPQVYTLPPSRDELTKNQVSLTCLVKGFYPSDIAVEWESNGQPENNYKTTPPVLDSDGSFFLYSKLTVDKSRWQQGNVFSCSVMHEALHNHYTQKSLSLSPGK

SEQ ID NO: 809 - protein, 248 aa, Artificial
  Synthetic
CNVNHKPSNTKVDKKVEPKSCDKTHTCPPCPAPELLGGPSVFLFPPKPKDTLMISRTPEVTCVVVDVSHEDPEVKFNWYVDGVEVHNAKTKPREEQYNSTVRVVSVLTVLHQDWLNGKEYKCKVSNKALPAPIEKTISKAKGQPREPQVYTLPPSRDELTKNQVSLTCLVKGFYPSDIAVEWESNGQPENNYKTTPPVLDSDGSFFLYSKLTVDKSRWQQGNVFSCSVMHEALHNHYTQKSLSLSPGK

SEQ ID NO: 810 - protein, 248 aa, Artificial
  Synthetic
CNVNHKPSNTKVDKKVEPKSCDKTHTCPPCPAPELLGGPSVFLFPPKPKDTLMISRTPEVTCVVVDVSHEDPEVKFNWYVDGVEVHNAKTKPREEQYNSTMRVVSVLTVLHQDWLNGKEYKCKVSNKALPAPIEKTISKAKGQPREPQVYTLPPSRDELTKNQVSLTCLVKGFYPSDIAVEWESNGQPENNYKTTPPVLDSDGSFFLYSKLTVDKSRWQQGNVFSCSVMHEALHNHYTQKSLSLSPGK

SEQ ID NO: 811 - protein, 248 aa, Artificial
  Synthetic
CNVNHKPSNTKVDKKVEPKSCDKTHTCPPCPAPELLGGPSVFLFPPKPKDTLMISRTPEVTCVVVDVSHEDPEVKFNWYVDGVEVHNAKTKPREEQYNSTWRVVSVLTVLHQDWLNGKEYKCKVSNKALPAPIEKTISKAKGQPREPQVYTLPPSRDELTKNQVSLTCLVKGFYPSDIAVEWESNGQPENNYKTTPPVLDSDGSFFLYSKLTVDKSRWQQGNVFSCSVMHEALHNHYTQKSLSLSPGK

SEQ ID NO: 812 - protein, 248 aa, Artificial
  Synthetic
CNVNHKPSNTKVDKKVEPKSCDKTHTCPPCPAPELLGGPSVFLFPPKPKDTLMISRTPEVTCVVVDVSHEDPEVKFNWYVDGVEVHNAKTKPREEQYNSTPRVVSVLTVLHQDWLNGKEYKCKVSNKALPAPIEKTISKAKGQPREPQVYTLPPSRDELTKNQVSLTCLVKGFYPSDIAVEWESNGQPENNYKTTPPVLDSDGSFFLYSKLTVDKSRWQQGNVFSCSVMHEALHNHYTQKSLSLSPGK

SEQ ID NO: 813 - protein, 248 aa, Artificial
  Synthetic
CNVNHKPSNTKVDKKVEPKSCDKTHTCPPCPAPELLGGPSVFLFPPKPKDTLMISRTPEVTCVVVDVSHEDPEVKFNWYVDGVEVHNAKTKPREEQYNSTGRVVSVLTVLHQDWLNGKEYKCKVSNKALPAPIEKTISKAKGQPREPQVYTLPPSRDELTKNQVSLTCLVKGFYPSDIAVEWESNGQPENNYKTTPPVLDSDGSFFLYSKLTVDKSRWQQGNVFSCSVMHEALHNHYTQKSLSLSPGK

SEQ ID NO: 814 - protein, 248 aa, Artificial
  Synthetic
CNVNHKPSNTKVDKKVEPKSCDKTHTCPPCPAPELLGGPSVFLFPPKPKDTLMISRTPEVTCVVVDVSHEDPEVKFNWYVDGVEVHNAKTKPREEQYNSTYRVVSVLTVLHQDWLNGKEYKCKVSNKALPEPIEKTISKAKGQPREPQVYTLPPSRDELTKNQVSLTCLVKGFYPSDIAVEWESNGQPENNYKTTPPVLDSDGSFFLYSKLTVDKSRWQQGNVFSCSVMHEALHNHYTQKSLSLSPGK

SEQ ID NO: 815 - protein, 247 aa, Artificial
  Synthetic
CNVNHKPSNTKVDKKVEPKSCDKTHTCPPCPAPELLGGPSVFLFPPKPKDTLMISRTPEVTCVVVDVSHDPEVKFNWYVDGVEVHNAKTKPREEQYNSTYRVVSVLTVLHQDWLNGKEYKCKVSNKALPNPIEKTISKAKGQPREPQVYTLPPSRDELTKNQVSLTCLVKGFYPSDIAVEWESNGQPENNYKTTPPVLDSDGSFFLYSKLTVDKSRWQQGNVFSCSVMHEALHNHYTQKSLSLSPGK

SEQ ID NO: 816 - protein, 248 aa, Artificial
  Synthetic
CNVNHKPSNTKVDKKVEPKSCDKTHTCPPCPAPELLGGPSVFLFPPKPKDTLMISRTPEVTCVVVDVSHEDPEVKFNWYVDGVEVHNAKTKPREEQYNSTYRVVSVLTVLHQDWLNGKEYKCKVSNKALPTPIEKTISKAKGQPREPQVYTLPPSRDELTKNQVSLTCLVKGFYPSDIAVEWESNGQPENNYKTTPPVLDSDGSFFLYSKLTVDKSRWQQGNVFSCSVMHEALHNHYTQKSLSLSPGK

SEQ ID NO: 817 - protein, 248 aa, Artificial
  Synthetic
CNVNHKPSNTKVDKKVEPKSCDKTHTCPPCPAPELLGGPSVFLFPPKPKDTLMISRTPEVTCVVVDVSHEDPEVKFNWYVDGVEVHNAKTKPREEQYNSTYRVVSVLTVLHQDWLNGKEYKCKVSNKALPPPIEKTISKAKGQPREPQVYTLPPSRDELTKNQVSLTCLVKGFYPSDIAVEWESNGQPENNYKTTPPVLDSDGSFFLYSKLTVDKSRWQQGNVFSCSVMHEALHNHYTQKSLSLSPGK

SEQ ID NO: 818 - protein, 248 aa, Artificial
  Synthetic
CNVNHKPSNTKVDKKVEPKSCDKTHTCPPCPAPELLGGPSVFLFPPKPKDTLMISRTPEVTCVVVDVSHEDPEVKFNWYVDGVEVHNAKTKPREEQYNSTYRVVSVLTVLHQDWLNGKEYKCKVSNKALPGPIEKTISKAKGQPREPQVYTLPPSRDELTKNQVSLTCLVKGFYPSDIAVEWESNGQPENNYKTTPPVLDSDGSFFLYSKLTVDKSRWQQGNVFSCSVMHEALHNHYTQKSLSLSPGK

SEQ ID NO: 819 - protein, 248 aa, Artificial
  Synthetic
CNVNHKPSNTKVDKKVEPKSCDKTHTCPPCPAPELLGGPSVFLFPPKPKDTLMISRTPEVTCVVVDVSHEDPEVKFNWYVDGVEVHNAKTKPREEQYNSTYRVVSVLTVLHQDWLNGKEYKCKVSNKALPAPKEKTISKAKGQPREPQVYTLPPSRDELTKNQVSLTCLVKGFYPSDIAVEWESNGQPENNYKTTPPVLDSDGSFFLYSKLTVDKSRWQQGNVFSCSVMHEALHNHYTQKSLSLSPGK

SEQ ID NO: 820 - protein, 248 aa, Artificial
  Synthetic
CNVNHKPSNTKVDKKVEPKSCDKTHTCPPCPAPELLGGPSVFLFPPKPKDTLMISRTPEVTCVVVDVSHEDPEVKFNWYVDGVEVHNAKTKPREEQYNSTYRVVSVLTVLHQDWLNGKEYKCKVSNKALPAPREKTISKAKGQPREPQVYTLPPSRDELTKNQVSLTCLVKGFYPSDIAVEWESNGQPENNYKTTPPVLDSDGSFFLYSKLTVDKSRWQQGNVFSCSVMHEALHNHYTQKSLSLSPGK

SEQ ID NO: 821 - protein, 248 aa, Artificial
  Synthetic
CNVNHKPSNTKVDKKVEPKSCDKTHTCPPCPAPELLGGPSVFLFPPKPKDTLMISRTPEVTCVVVDVSHEDPEVKFNWYVDGVEVHNAKTKPREEQYNSTYRVVSVLTVLHQDWLNGKEYKCKVSNKALPAPSEKTISKAKGQPREPQVYTLPPSRDELTKNQVSLTCLVKGFYPSDIAVEWESNGQPENNYKTTPPVLDSDGSFFLYSKLTVDKSRWQQGNVFSCSVMHEALHNHYTQKSLSLSPGK

SEQ ID NO: 822 - protein, 248 aa, Artificial
  Synthetic
CNVNHKPSNTKVDKKVEPKSCDKTHTCPPCPAPELLGGPSVFLFPPKPKDTLMISRTPEVTCVVVDVSHEDPEVKFNWYVDGVEVHNAKTKPREEQYNSTYRVVSVLTVLHQDWLNGKEYKCKVSNKALPAPVEKTISKAKGQPREPQVYTLPPSRDELTKNQVSLTCLVKGFYPSDIAVEWESNGQPENNYKTTPPVLDSDGSFFLYSKLTVDKSRWQQGNVFSCSVMHEALHNHYTQKSLSLSPGK

SEQ ID NO: 823 - protein, 248 aa, Artificial
  Synthetic
CNVNHKPSNTKVDKKVEPKSCDKTHTCPPCPAPELLGGPSVFLFPPKPKDTLMISRTPEVTCVVVDVSHEDPEVKFNWYVDGVEVHNAKTKPREEQYNSTYRVVSVLTVLHQDWLNGKEYKCKVSNKALPAPLEKTISKAKGQPREPQVYTLPPSRDELTKNQVSLTCLVKGFYPSDIAVEWESNGQPENNYKTTPPVLDSDGSFFLYSKLTVDKSRWQQGNVFSCSVMHEALHNHYTQKSLSLSPGK

SEQ ID NO: 824 - protein, 248 aa, Artificial
  Synthetic
CNVNHKPSNTKVDKKVEPKSCDKTHTCPPCPAPELLGGPSVFLFPPKPKDTLMISRTPEVTCVVVDVSHEDPEVKFNWYVDGVEVHNAKTKPREEQYNSTYRVVSVLTVLHQDWLNGKEYKCKVSNKALPAPFEKTISKAKGQPREPQVYTLPPSRDELTKNQVSLTCLVKGFYPSDIAVEWESNGQPENNYKTTPPVLDSDGSFFLYSKLTVDKSRWQQGNVFSCSVMHEALHNHYTQKSLSLSPGK

SEQ ID NO: 825 - protein, 248 aa, Artificial
  Synthetic
CNVNHKPSNTKVDKKVEPKSCDKTHTCPPCPAPELLGGPSVFLFPPKPKDTLMISRTPEVTCVVVDVSHEDPEVKFNWYVDGVEVHNAKTKPREEQYNSTYRVVSVLTVLHQDWLNGKEYKCKVSNKALPAPMEKTISKAKGQPREPQVYTLPPSRDELTKNQVSLTCLVKGFYPSDIAVEWESNGQPENNYKTTPPVLDSDGSFFLYSKLTVDKSRWQQGNVFSCSVMHEALHNHYTQKSLSLSPGK

SEQ ID NO: 826 - protein, 248 aa, Artificial
  Synthetic
CNVNHKPSNTKVDKKVEPKSCDKTHTCPPCPAPELLGGPSVFLFPPKPKDTLMISRTPEVTCVVVDVSHEDPEVKFNWYVDGVEVHNAKTKPREEQYNSTYRVVSVLTVLHQDWLNGKEYKCKVSNKALPAPWEKTISKAKGQPREPQVYTLPPSRDELTKNQVSLTCLVKGFYPSDIAVEWESNGQPENNYKTTPPVLDSDGSFFLYSKLTVDKSRWQQGNVFSCSVMHEALHNHYTQKSLSLSPGK

SEQ ID NO: 827 - protein, 248 aa, Artificial
  Synthetic
CNVNHKPSNTKVDKKVEPKSCDKTHTCPPCPAPELLGGPSVFLFPPKPKDTLMISRTPEVTCVVVDVSHEDPEVKFNWYVDGVEVHNAKTKPREEQYNSTYRVVSVLTVLHQDWLNGKEYKCKVSNKALPAPPEKTISKAKGQPREPQVYTLPPSRDELTKNQVSLTCLVKGFYPSDIAVEWESNGQPENNYKTTPPVLDSDGSFFLYSKLTVDKSRWQQGNVFSCSVMHEALHNHYTQKSLSLSPGK

SEQ ID NO: 828 - protein, 248 aa, Artificial
  Synthetic
CNVNHKPSNTKVDKKVEPKSCDKTHTCPPCPAPELLGGPSVFLFPPKPKDTLMISRTPEVTCVVVDVSHEDPEVKFNWYVDGVEVHNAKTKPREEQYNSTYRVVSVLTVLHQDWLNGKEYKCKVSNKALPAPGEKTISKAKGQPREPQVYTLPPSRDELTKNQVSLTCLVKGFYPSDIAVEWESNGQPENNYKTTPPVLDSDGSFFLYSKLTVDKSRWQQGNVFSCSVMHEALHNHYTQKSLSLSPGK

SEQ ID NO: 829 - protein, 248 aa, Artificial
  Synthetic
CNVNHKPSNTKVDKKVEPKSCDKTHTCPPCPAPEKLGGPSVFLFPPKPKDTLMISRTPEVTCVVVDVSHEDPEVKFNWYVDGVEVHNAKTKPREEQYNSTYRVVSVLTVLHQDWLNGKEYKCKVSNKALPAPIEKTISKAKGQPREPQVYTLPPSRDELTKNQVSLTCLVKGFYPSDIAVEWESNGQPENNYKTTPPVLDSDGSFFLYSKLTVDKSRWQQGNVFSCSVMHEALHNHYTQKSLSLSPGK

SEQ ID NO: 830 - protein, 248 aa, Artificial
  Synthetic
CNVNHKPSNTKVDKKVEPKSCDKTHTCPPCPAPERLGGPSVFLFPPKPKDTLMISRTPEVTCVVVDVSHEDPEVKFNWYVDGVEVHNAKTKPREEQYNSTYRVVSVLTVLHQDWLNGKEYKCKVSNKALPAPIEKTISKAKGQPREPQVYTLPPSRDELTKNQVSLTCLVKGFYPSDIAVEWESNGQPENNYKTTPPVLDSDGSFFLYSKLTVDKSRWQQGNVFSCSVMHEALHNHYTQKSLSLSPGK

SEQ ID NO: 831 - protein, 248 aa, Artificial
  Synthetic
CNVNHKPSNTKVDKKVEPKSCDKTHTCPPCPAPESLGGPSVFLFPPKPKDTLMISRTPEVTCVVVDVSHEDPEVKFNWYVDGVEVHNAKTKPREEQYNSTYRVVSVLTVLHQDWLNGKEYKCKVSNKALPAPIEKTISKAKGQPREPQVYTLPPSRDELTKNQVSLTCLVKGFYPSDIAVEWESNGQPENNYKTTPPVLDSDGSFFLYSKLTVDKSRWQQGNVFSCSVMHEALHNHYTQKSLSLSPGK

SEQ ID NO: 832 - protein, 248 aa, Artificial
  Synthetic
CNVNHKPSNTKVDKKVEPKSCDKTHTCPPCPAPEALGGPSVFLFPPKPKDTLMISRTPEVTCVVVDVSHEDPEVKFNWYVDGVEVHNAKTKPREEQYNSTYRVVSVLTVLHQDWLNGKEYKCKVSNKALPAPIEKTISKAKGQPREPQVYTLPPSRDELTKNQVSLTCLVKGFYPSDIAVEWESNGQPENNYKTTPPVLDSDGSFFLYSKLTVDKSRWQQGNVFSCSVMHEALHNHYTQKSLSLSPGK

SEQ ID NO: 833 - protein, 248 aa, Artificial
  Synthetic
CNVNHKPSNTKVDKKVEPKSCDKTHTCPPCPAPEMLGGPSVFLFPPKPKDTLMISRTPEVTCVVVDVSHEDPEVKFNWYVDGVEVHNAKTKPREEQYNSTYRVVSVLTVLHQDWLNGKEYKCKVSNKALPAPIEKTISKAKGQPREPQVYTLPPSRDELTKNQVSLTCLVKGFYPSDIAVEWESNGQPENNYKTTPPVLDSDGSFFLYSKLTVDKSRWQQGNVFSCSVMHEALHNHYTQKSLSLSPGK

SEQ ID NO: 834 - protein, 248 aa, Artificial
  Synthetic
CNVNHKPSNTKVDKKVEPKSCDKTHTCPPCPAPEWLGGPSVFLFPPKPKDTLMISRTPEVTCVVVDVSHEDPEVKFNWYVDGVEVHNAKTKPREEQYNSTYRVVSVLTVLHQDWLNGKEYKCKVSNKALPAPIEKTISKAKGQPREPQVYTLPPSRDELTKNQVSLTCLVKGFYPSDIAVEWESNGQPENNYKTTPPVLDSDGSFFLYSKLTVDKSRWQQGNVFSCSVMHEALHNHYTQKSLSLSPGK

SEQ ID NO: 835 - protein, 248 aa, Artificial
  Synthetic
CNVNHKPSNTKVDKKVEPKSCDKTHTCPPCPAPEPLGGPSVFLFPPKPKDTLMISRTPEVTCVVVDVSHEDPEVKFNWYVDGVEVHNAKTKPREEQYNSTYRVVSVLTVLHQDWLNGKEYKCKVSNKALPAPIEKTISKAKGQPREPQVYTLPPSRDELTKNQVSLTCLVKGFYPSDIAVEWESNGQPENNYKTTPPVLDSDGSFFLYSKLTVDKSRWQQGNVFSCSVMHEALHNHYTQKSLSLSPGK

SEQ ID NO: 836 - protein, 248 aa, Artificial
  Synthetic
CNVNHKPSNTKVDKKVEPKSCDKTHTCPPCPAPEGLGGPSVFLFPPKPKDTLMISRTPEVTCVVVDVSHEDPEVKFNWYVDGVEVHNAKTKPREEQYNSTYRVVSVLTVLHQDWLNGKEYKCKVSNKALPAPIEKTISKAKGQPREPQVYTLPPSRDELTKNQVSLTCLVKGFYPSDIAVEWESNGQPENNYKTTPPVLDSDGSFFLYSKLTVDKSRWQQGNVFSCSVMHEALHNHYTQKSLSLSPGK

SEQ ID NO: 837 - protein, 248 aa, Artificial
  Synthetic
CNVNHKPSNTKVDKKVEPKSCDKTHTCPPCPAPELEGGPSVFLFPPKPKDTLMISRTPEVTCVVVDVSHEDPEVKFNWYVDGVEVHNAKTKPREEQYNSTYRVVSVLTVLHQDWLNGKEYKCKVSNKALPAPIEKTISKAKGQPREPQVYTLPPSRDELTKNQVSLTCLVKGFYPSDIAVEWESNGQPENNYKTTPPVLDSDGSFFLYSKLTVDKSRWQQGNVFSCSVMHEALHNHYTQKSLSLSPGK

SEQ ID NO: 838 - protein, 248 aa, Artificial
  Synthetic
CNVNHKPSNTKVDKKVEPKSCDKTHTCPPCPAPELKGGPSVFLFPPKPKDTLMISRTPEVTCVVVDVSHEDPEVKFNWYVDGVEVHNAKTKPREEQYNSTYRVVSVLTVLHQDWLNGKEYKCKVSNKALPAPIEKTISKAKGQPREPQVYTLPPSRDELTKNQVSLTCLVKGFYPSDIAVEWESNGQPENNYKTTPPVLDSDGSFFLYSKLTVDKSRWQQGNVFSCSVMHEALHNHYTQKSLSLSPGK

SEQ ID NO: 839 - protein, 248 aa, Artificial
  Synthetic
CNVNHKPSNTKVDKKVEPKSCDKTHTCPPCPAPELRGGPSVFLFPPKPKDTLMISRTPEVTCVVVDVSHEDPEVKFNWYVDGVEVHNAKTKPREEQYNSTYRVVSVLTVLHQDWLNGKEYKCKVSNKALPAPIEKTISKAKGQPREPQVYTLPPSRDELTKNQVSLTCLVKGFYPSDIAVEWESNGQPENNYKTTPPVLDSDGSFFLYSKLTVDKSRWQQGNVFSCSVMHEALHNHYTQKSLSLSPGK

SEQ ID NO: 840 - protein, 248 aa, Artificial
  Synthetic
CNVNHKPSNTKVDKKVEPKSCDKTHTCPPCPAPELAGGPSVFLFPPKPKDTLMISRTPEVTCVVVDVSHEDPEVKFNWYVDGVEVHNAKTKPREEQYNSTYRVVSVLTVLHQDWLNGKEYKCKVSNKALPAPIEKTISKAKGQPREPQVYTLPPSRDELTKNQVSLTCLVKGFYPSDIAVEWESNGQPENNYKTTPPVLDSDGSFFLYSKLTVDKSRWQQGNVFSCSVMHEALHNHYTQKSLSLSPGK

SEQ ID NO: 841 - protein, 248 aa, Artificial
  Synthetic
CNVNHKPSNTKVDKKVEPKSCDKTHTCPPCPAPELMGGPSVFLFPPKPKDTLMISRTPEVTCVVVDVSHEDPEVKFNWYVDGVEVHNAKTKPREEQYNSTYRVVSVLTVLHQDWLNGKEYKCKVSNKALPAPIEKTISKAKGQPREPQVYTLPPSRDELTKNQVSLTCLVKGFYPSDIAVEWESNGQPENNYKTTPPVLDSDGSFFLYSKLTVDKSRWQQGNVFSCSVMHEALHNHYTQKSLSLSPGK

SEQ ID NO: 842 - protein, 248 aa, Artificial
  Synthetic
CNVNHKPSNTKVDKKVEPKSCDKTHTCPPCPAPELWGGPSVFLFPPKPKDTLMISRTPEVTCVVVDVSHEDPEVKFNWYVDGVEVHNAKTKPREEQYNSTYRVVSVLTVLHQDWLNGKEYKCKVSNKALPAPIEKTISKAKGQPREPQVYTLPPSRDELTKNQVSLTCLVKGFYPSDIAVEWESNGQPENNYKTTPPVLDSDGSFFLYSKLTVDKSRWQQGNVFSCSVMHEALHNHYTQKSLSLSPGK

SEQ ID NO: 843 - protein, 248 aa, Artificial
  Synthetic
CNVNHKPSNTKVDKKVEPKSCDKTHTCPPCPAPELPGGPSVFLFPPKPKDTLMISRTPEVTCVVVDVSHEDPEVKFNWYVDGVEVHNAKTKPREEQYNSTYRVVSVLTVLHQDWLNGKEYKCKVSNKALPAPIEKTISKAKGQPREPQVYTLPPSRDELTKNQVSLTCLVKGFYPSDIAVEWESNGQPENNYKTTPPVLDSDGSFFLYSKLTVDKSRWQQGNVFSCSVMHEALHNHYTQKSLSLSPGK

SEQ ID NO: 844 - protein, 248 aa, Artificial
  Synthetic
CNVNHKPSNTKVDKKVEPKSCDKTHTCPPCPAPELGGGPSVFLFPPKPKDTLMISRTPEVTCVVVDVSHEDPEVKFNWYVDGVEVHNAKTKPREEQYNSTYRVVSVLTVLHQDWLNGKEYKCKVSNKALPAPIEKTISKAKGQPREPQVYTLPPSRDELTKNQVSLTCLVKGFYPSDIAVEWESNGQPENNYKTTPPVLDSDGSFFLYSKLTVDKSRWQQGNVFSCSVMHEALHNHYTQKSLSLSPGK

SEQ ID NO: 845 - protein, 248 aa, Artificial
  Synthetic
CNVNHKPSNTKVDKKVEPKSCDKTHTCPPCPAPELLGGPSVFLFPPKPKDTLMISRTPEVTCVVDDVSHEDPEVKFNWYVDGVEVHNAKTKPREEQYNSTYRVVSVLTVLHQDWLNGKEYKCKVSNKALPAPIEKTISKAKGQPREPQVYTLPPSRDELTKNQVSLTCLVKGFYPSDIAVEWESNGQPENNYKTTPPVLDSDGSFFLYSKLTVDKSRWQQGNVFSCSVMHEALHNHYTQKSLSLSPGK

SEQ ID NO: 846 - protein, 248 aa, Artificial
  Synthetic
CNVNHKPSNTKVDKKVEPKSCDKTHTCPPCPAPELLGGPSVFLFPPKPKDTLMISRTPEVTCVVEDVSHEDPEVKFNWYVDGVEVHNAKTKPREEQYNSTYRVVSVLTVLHQDWLNGKEYKCKVSNKALPAPIEKTISKAKGQPREPQVYTLPPSRDELTKNQVSLTCLVKGFYPSDIAVEWESNGQPENNYKTTPPVLDSDGSFFLYSKLTVDKSRWQQGNVFSCSVMHEALHNHYTQKSLSLSPGK

SEQ ID NO: 847 - protein, 248 aa, Artificial
  Synthetic
CNVNHKPSNTKVDKKVEPKSCDKTHTCPPCPAPELLGGPSVFLFPPKPKDTLMISRTPEVTCVVNDVSHEDPEVKFNWYVDGVEVHNAKTKPREEQYNSTYRVVSVLTVLHQDWLNGKEYKCKVSNKALPAPIEKTISKAKGQPREPQVYTLPPSRDELTKNQVSLTCLVKGFYPSDIAVEWESNGQPENNYKTTPPVLDSDGSFFLYSKLTVDKSRWQQGNVFSCSVMHEALHNHYTQKSLSLSPGK

SEQ ID NO: 848 - protein, 248 aa, Artificial
  Synthetic
CNVNHKPSNTKVDKKVEPKSCDKTHTCPPCPAPELLGGPSVFLFPPKPKDTLMISRTPEVTCVVQDVSHEDPEVKFNWYVDGVEVHNAKTKPREEQYNSTYRVVSVLTVLHQDWLNGKEYKCKVSNKALPAPIEKTISKAKGQPREPQVYTLPPSRDELTKNQVSLTCLVKGFYPSDIAVEWESNGQPENNYKTTPPVLDSDGSFFLYSKLTVDKSRWQQGNVFSCSVMHEALHNHYTQKSLSLSPGK

SEQ ID NO: 849 - protein, 248 aa, Artificial
  Synthetic
CNVNHKPSNTKVDKKVEPKSCDKTHTCPPCPAPELLGGPSVFLFPPKPKDTLMISRTPEVTCVVKDVSHEDPEVKFNWYVDGVEVHNAKTKPREEQYNSTYRVVSVLTVLHQDWLNGKEYKCKVSNKALPAPIEKTISKAKGQPREPQVYTLPPSRDELTKNQVSLTCLVKGFYPSDIAVEWESNGQPENNYKTTPPVLDSDGSFFLYSKLTVDKSRWQQGNVFSCSVMHEALHNHYTQKSLSLSPGK

SEQ ID NO: 850 - protein, 248 aa, Artificial
  Synthetic
CNVNHKPSNTKVDKKVEPKSCDKTHTCPPCPAPELLGGPSVFLFPPKPKDTLMISRTPEVTCVVRDVSHEDPEVKFNWYVDGVEVHNAKTKPREEQYNSTYRVVSVLTVLHQDWLNGKEYKCKVSNKALPAPIEKTISKAKGQPREPQVYTLPPSRDELTKNQVSLTCLVKGFYPSDIAVEWESNGQPENNYKTTPPVLDSDGSFFLYSKLTVDKSRWQQGNVFSCSVMHEALHNHYTQKSLSLSPGK

SEQ ID NO: 851 - protein, 248 aa, Artificial
  Synthetic
CNVNHKPSNTKVDKKVEPKSCDKTHTCPPCPAPELLGGPSVFLFPPKPKDTLMISRTPEVTCVVSDVSHEDPEVKFNWYVDGVEVHNAKTKPREEQYNSTYRVVSVLTVLHQDWLNGKEYKCKVSNKALPAPIEKTISKAKGQPREPQVYTLPPSRDELTKNQVSLTCLVKGFYPSDIAVEWESNGQPENNYKTTPPVLDSDGSFFLYSKLTVDKSRWQQGNVFSCSVMHEALHNHYTQKSLSLSPGK

SEQ ID NO: 852 - protein, 248 aa, Artificial
  Synthetic
CNVNHKPSNTKVDKKVEPKSCDKTHTCPPCPAPELLGGPSVFLFPPKPKDTLMISRTPEVTCVVHDVSHEDPEVKFNWYVDGVEVHNAKTKPREEQYNSTYRVVSVLTVLHQDWLNGKEYKCKVSNKALPAPIEKTISKAKGQPREPQVYTLPPSRDELTKNQVSLTCLVKGFYPSDIAVEWESNGQPENNYKTTPPVLDSDGSFFLYSKLTVDKSRWQQGNVFSCSVMHEALHNHYTQKSLSLSPGK

SEQ ID NO: 853 - protein, 248 aa, Artificial
  Synthetic
CNVNHKPSNTKVDKKVEPKSCDKTHTCPPCPAPELLGGPSVFLFPPKPKDTLMISRTPEVTCVVWDVSHEDPEVKFNWYVDGVEVHNAKTKPREEQYNSTYRVVSVLTVLHQDWLNGKEYKCKVSNKALPAPIEKTISKAKGQPREPQVYTLPPSRDELTKNQVSLTCLVKGFYPSDIAVEWESNGQPENNYKTTPPVLDSDGSFFLYSKLTVDKSRWQQGNVFSCSVMHEALHNHYTQKSLSLSPGK

SEQ ID NO: 854 - protein, 248 aa, Artificial
  Synthetic
CNVNHKPSNTKVDKKVEPKSCDKTHTCPPCPAPELLGGPSVFLFPPKPKDTLMISRTPEVTCVVPDVSHEDPEVKFNWYVDGVEVHNAKTKPREEQYNSTYRVVSVLTVLHQDWLNGKEYKCKVSNKALPAPIEKTISKAKGQPREPQVYTLPPSRDELTKNQVSLTCLVKGFYPSDIAVEWESNGQPENNYKTTPPVLDSDGSFFLYSKLTVDKSRWQQGNVFSCSVMHEALHNHYTQKSLSLSPGK

SEQ ID NO: 855 - protein, 248 aa, Artificial
  Synthetic
CNVNHKPSNTKVDKKVEPKSCDKTHTCPPCPAPELLGGPSVFLFPPKPKDTLMISRTPEVTCVVGDVSHEDPEVKFNWYVDGVEVHNAKTKPREEQYNSTYRVVSVLTVLHQDWLNGKEYKCKVSNKALPAPIEKTISKAKGQPREPQVYTLPPSRDELTKNQVSLTCLVKGFYPSDIAVEWESNGQPENNYKTTPPVLDSDGSFFLYSKLTVDKSRWQQGNVFSCSVMHEALHNHYTQKSLSLSPGK

SEQ ID NO: 856 - protein, 248 aa, Artificial
  Synthetic
CNVNHKPSNTKVDKKVEPKSCDKTHTCPPCPAPELLGGPSVFLFPPKPKDTLMISRTPEVTCVVVQVSHEDPEVKFNWYVDGVEVHNAKTKPREEQYNSTYRVVSVLTVLHQDWLNGKEYKCKVSNKALPAPIEKTISKAKGQPREPQVYTLPPSRDELTKNQVSLTCLVKGFYPSDIAVEWESNGQPENNYKTTPPVLDSDGSFFLYSKLTVDKSRWQQGNVFSCSVMHEALHNHYTQKSLSLSPGK

SEQ ID NO: 857 - protein, 248 aa, Artificial
  Synthetic
CNVNHKPSNTKVDKKVEPKSCDKTHTCPPCPAPELLGGPSVFLFPPKPKDTLMISRTPEVTCVVVKVSHEDPEVKFNWYVDGVEVHNAKTKPREEQYNSTYRVVSVLTVLHQDWLNGKEYKCKVSNKALPAPIEKTISKAKGQPREPQVYTLPPSRDELTKNQVSLTCLVKGFYPSDIAVEWESNGQPENNYKTTPPVLDSDGSFFLYSKLTVDKSRWQQGNVFSCSVMHEALHNHYTQKSLSLSPGK

SEQ ID NO: 858 - protein, 248 aa, Artificial
  Synthetic
CNVNHKPSNTKVDKKVEPKSCDKTHTCPPCPAPELLGGPSVFLFPPKPKDTLMISRTPEVTCVVVRVSHEDPEVKFNWYVDGVEVHNAKTKPREEQYNSTYRVVSVLTVLHQDWLNGKEYKCKVSNKALPAPIEKTISKAKGQPREPQVYTLPPSRDELTKNQVSLTCLVKGFYPSDIAVEWESNGQPENNYKTTPPVLDSDGSFFLYSKLTVDKSRWQQGNVFSCSVMHEALHNHYTQKSLSLSPGK

SEQ ID NO: 859 - protein, 248 aa, Artificial
  Synthetic
CNVNHKPSNTKVDKKVEPKSCDKTHTCPPCPAPELLGGPSVFLFPPKPKDTLMISRTPEVTCVVVSVSHEDPEVKFNWYVDGVEVHNAKTKPREEQYNSTYRVVSVLTVLHQDWLNGKEYKCKVSNKALPAPIEKTISKAKGQPREPQVYTLPPSRDELTKNQVSLTCLVKGFYPSDIAVEWESNGQPENNYKTTPPVLDSDGSFFLYSKLTVDKSRWQQGNVFSCSVMHEALHNHYTQKSLSLSPGK

SEQ ID NO: 860 - protein, 248 aa, Artificial
  Synthetic
CNVNHKPSNTKVDKKVEPKSCDKTHTCPPCPAPELLGGPSVFLFPPKPKDTLMISRTPEVTCVVVTVSHEDPEVKFNWYVDGVEVHNAKTKPREEQYNSTYRVVSVLTVLHQDWLNGKEYKCKVSNKALPAPIEKTISKAKGQPREPQVYTLPPSRDELTKNQVSLTCLVKGFYPSDIAVEWESNGQPENNYKTTPPVLDSDGSFFLYSKLTVDKSRWQQGNVFSCSVMHEALHNHYTQKSLSLSPGK

SEQ ID NO: 861 - protein, 248 aa, Artificial
  Synthetic
CNVNHKPSNTKVDKKVEPKSCDKTHTCPPCPAPELLGGPSVFLFPPKPKDTLMISRTPEVTCVVVHVSHEDPEVKFNWYVDGVEVHNAKTKPREEQYNSTYRVVSVLTVLHQDWLNGKEYKCKVSNKALPAPIEKTISKAKGQPREPQVYTLPPSRDELTKNQVSLTCLVKGFYPSDIAVEWESNGQPENNYKTTPPVLDSDGSFFLYSKLTVDKSRWQQGNVFSCSVMHEALHNHYTQKSLSLSPGK

SEQ ID NO: 862 - protein, 248 aa, Artificial
  Synthetic
CNVNHKPSNTKVDKKVEPKSCDKTHTCPPCPAPELLGGPSVFLFPPKPKDTLMISRTPEVTCVVVVVSHEDPEVKFNWYVDGVEVHNAKTKPREEQYNSTYRVVSVLTVLHQDWLNGKEYKCKVSNKALPAPIEKTISKAKGQPREPQVYTLPPSRDELTKNQVSLTCLVKGFYPSDIAVEWESNGQPENNYKTTPPVLDSDGSFFLYSKLTVDKSRWQQGNVFSCSVMHEALHNHYTQKSLSLSPGK

SEQ ID NO: 863 - protein, 248 aa, Artificial
  Synthetic
CNVNHKPSNTKVDKKVEPKSCDKTHTCPPCPAPELLGGPSVFLFPPKPKDTLMISRTPEVTCVVVLVSHEDPEVKFNWYVDGVEVHNAKTKPREEQYNSTYRVVSVLTVLHQDWLNGKEYKCKVSNKALPAPIEKTISKAKGQPREPQVYTLPPSRDELTKNQVSLTCLVKGFYPSDIAVEWESNGQPENNYKTTPPVLDSDGSFFLYSKLTVDKSRWQQGNVFSCSVMHEALHNHYTQKSLSLSPGK

SEQ ID NO: 864 - protein, 248 aa, Artificial
  Synthetic
CNVNHKPSNTKVDKKVEPKSCDKTHTCPPCPAPELLGGPSVFLFPPKPKDTLMISRTPEVTCVVVIVSHEDPEVKFNWYVDGVEVHNAKTKPREEQYNSTYRVVSVLTVLHQDWLNGKEYKCKVSNKALPAPIEKTISKAKGQPREPQVYTLPPSRDELTKNQVSLTCLVKGFYPSDIAVEWESNGQPENNYKTTPPVLDSDGSFFLYSKLTVDKSRWQQGNVFSCSVMHEALHNHYTQKSLSLSPGK

SEQ ID NO: 865 - protein, 248 aa, Artificial
  Synthetic
CNVNHKPSNTKVDKKVEPKSCDKTHTCPPCPAPELLGGPSVFLFPPKPKDTLMISRTPEVTCVVVFVSHEDPEVKFNWYVDGVEVHNAKTKPREEQYNSTYRVVSVLTVLHQDWLNGKEYKCKVSNKALPAPIEKTISKAKGQPREPQVYTLPPSRDELTKNQVSLTCLVKGFYPSDIAVEWESNGQPENNYKTTPPVLDSDGSFFLYSKLTVDKSRWQQGNVFSCSVMHEALHNHYTQKSLSLSPGK

SEQ ID NO: 866 - protein, 248 aa, Artificial
  Synthetic
CNVNHKPSNTKVDKKVEPKSCDKTHTCPPCPAPELLGGPSVFLFPPKPKDTLMISRTPEVTCVVVMVSHEDPEVKFNWYVDGVEVHNAKTKPREEQYNSTYRVVSVLTVLHQDWLNGKEYKCKVSNKALPAPIEKTISKAKGQPREPQVYTLPPSRDELTKNQVSLTCLVKGFYPSDIAVEWESNGQPENNYKTTPPVLDSDGSFFLYSKLTVDKSRWQQGNVFSCSVMHEALHNHYTQKSLSLSPGK

SEQ ID NO: 867 - protein, 248 aa, Artificial
  Synthetic
CNVNHKPSNTKVDKKVEPKSCDKTHTCPPCPAPELLGGPSVFLFPPKPKDTLMISRTPEVTCVVVYVSHEDPEVKFNWYVDGVEVHNAKTKPREEQYNSTYRVVSVLTVLHQDWLNGKEYKCKVSNKALPAPIEKTISKAKGQPREPQVYTLPPSRDELTKNQVSLTCLVKGFYPSDIAVEWESNGQPENNYKTTPPVLDSDGSFFLYSKLTVDKSRWQQGNVFSCSVMHEALHNHYTQKSLSLSPGK

SEQ ID NO: 868 - protein, 248 aa, Artificial
  Synthetic
CNVNHKPSNTKVDKKVEPKSCDKTHTCPPCPAPELLGGPSVFLFPPKPKDTLMISRTPEVTCVVVWVSHEDPEVKFNWYVDGVEVHNAKTKPREEQYNSTYRVVSVLTVLHQDWLNGKEYKCKVSNKALPAPIEKTISKAKGQPREPQVYTLPPSRDELTKNQVSLTCLVKGFYPSDIAVEWESNGQPENNYKTTPPVLDSDGSFFLYSKLTVDKSRWQQGNVFSCSVMHEALHNHYTQKSLSLSPGK

SEQ ID NO: 869 - protein, 248 aa, Artificial
  Synthetic
CNVNHKPSNTKVDKKVEPKSCDKTHTCPPCPAPELLGGPSVFLFPPKPKDTLMISRTPEVTCVVVPVSHEDPEVKFNWYVDGVEVHNAKTKPREEQYNSTYRVVSVLTVLHQDWLNGKEYKCKVSNKALPAPIEKTISKAKGQPREPQVYTLPPSRDELTKNQVSLTCLVKGFYPSDIAVEWESNGQPENNYKTTPPVLDSDGSFFLYSKLTVDKSRWQQGNVFSCSVMHEALHNHYTQKSLSLSPGK

SEQ ID NO: 870 - protein, 248 aa, Artificial
  Synthetic
CNVNHKPSNTKVDKKVEPKSCDKTHTCPPCPAPELLGGPSVFLFPPKPKDTLMISRTPEVTCVVVDVSHEDPEVKFNWYVDGVEVHNAKTKPREEQYNSTYRVVSVLTVLHQDWLNGKEYKCKVSNPALPAPIEKTISKAKGQPREPQVYTLPPSRDELTKNQVSLTCLVKGFYPSDIAVEWESNGQPENNYKTTPPVLDSDGSFFLYSKLTVDKSRWQQGNVFSCSVMHEALHNHYTQKSLSLSPGK

SEQ ID NO: 871 - protein, 248 aa, Artificial
  Synthetic
CNVNHKPSNTKVDKKVEPKSCDKTHTCPPCPAPELLGGPSVFLFPPKPKDTLMISRTPEVTCVVVDVSHEDPEVKFNWYVDGVEVHNAKTKPREEQYNSTYRVVSVLTVLHQDWLNGKEYKCKVSNKELPAPIEKTISKAKGQPREPQVYTLPPSRDELTKNQVSLTCLVKGFYPSDIAVEWESNGQPENNYKTTPPVLDSDGSFFLYSKLTVDKSRWQQGNVFSCSVMHEALHNHYTQKSLSLSPGK

SEQ ID NO: 872 - protein, 248 aa, Artificial
  Synthetic
CNVNHKPSNTKVDKKVEPKSCDKTHTCPPCPAPELLGGPSVFLFPPKPKDTLMISRTPEVTCVVVDVSHEDPEVKFNWYVDGVEVHNAKTKPREEQYNSTYRVVSVLTVLHQDWLNGKEYKCKVSNKKLPAPIEKTISKAKGQPREPQVYTLPPSRDELTKNQVSLTCLVKGFYPSDIAVEWESNGQPENNYKTTPPVLDSDGSFFLYSKLTVDKSRWQQGNVFSCSVMHEALHNHYTQKSLSLSPGK

SEQ ID NO: 873 - protein, 248 aa, Artificial
  Synthetic
CNVNHKPSNTKVDKKVEPKSCDKTHTCPPCPAPELLGGPSVFLFPPKPKDTLMISRTPEVTCVVVDVSHEDPEVKFNWYVDGVEVHNAKTKPREEQYNSTYRVVSVLTVLHQDWLNGKEYKCKVSNKRLPAPIEKTISKAKGQPREPQVYTLPPSRDELTKNQVSLTCLVKGFYPSDIAVEWESNGQPENNYKTTPPVLDSDGSFFLYSKLTVDKSRWQQGNVFSCSVMHEALHNHYTQKSLSLSPGK

SEQ ID NO: 874 - protein, 248 aa, Artificial
  Synthetic
CNVNHKPSNTKVDKKVEPKSCDKTHTCPPCPAPELLGGPSVFLFPPKPKDTLMISRTPEVTCVVVDVSHEDPEVKFNWYVDGVEVHNAKTKPREEQYNSTYRVVSVLTVLHQDWLNGKEYKCKVSNKHLPAPIEKTISKAKGQPREPQVYTLPPSRDELTKNQVSLTCLVKGFYPSDIAVEWESNGQPENNYKTTPPVLDSDGSFFLYSKLTVDKSRWQQGNVFSCSVMHEALHNHYTQKSLSLSPGK

SEQ ID NO: 875 - protein, 248 aa, Artificial
  Synthetic
CNVNHKPSNTKVDKKVEPKSCDKTHTCPPCPAPELLGGPSVFLFPPKPKDTLMISRTPEVTCVVVDVSHEDPEVKFNWYVDGVEVHNAKTKPREEQYNSTYRVVSVLTVLHQDWLNGKEYKCKVSNKVLPAPIEKTISKAKGQPREPQVYTLPPSRDELTKNQVSLTCLVKGFYPSDIAVEWESNGQPENNYKTTPPVLDSDGSFFLYSKLTVDKSRWQQGNVFSCSVMHEALHNHYTQKSLSLSPGK

SEQ ID NO: 876 - protein, 248 aa, Artificial
  Synthetic
CNVNHKPSNTKVDKKVEPKSCDKTHTCPPCPAPELLGGPSVFLFPPKPKDTLMISRTPEVTCVVVDVSHEDPEVKFNWYVDGVEVHNAKTKPREEQYNSTYRVVSVLTVLHQDWLNGKEYKCKVSNKILPAPIEKTISKAKGQPREPQVYTLPPSRDELTKNQVSLTCLVKGFYPSDIAVEWESNGQPENNYKTTPPVLDSDGSFFLYSKLTVDKSRWQQGNVFSCSVMHEALHNHYTQKSLSLSPGK

SEQ ID NO: 877 - protein, 248 aa, Artificial
  Synthetic
CNVNHKPSNTKVDKKVEPKSCDKTHTCPPCPAPELLGGPSVFLFPPKPKDTLMISRTPEVTCVVVDVSHEDPEVKFNWYVDGVEVHNAKTKPREEQYNSTYRVVSVLTVLHQDWLNGKEYKCKVSNKFLPAPIEKTISKAKGQPREPQVYTLPPSRDELTKNQVSLTCLVKGFYPSDIAVEWESNGQPENNYKTTPPVLDSDGSFFLYSKLTVDKSRWQQGNVFSCSVMHEALHNHYTQKSLSLSPGK

SEQ ID NO: 878 - protein, 248 aa, Artificial
  Synthetic
CNVNHKPSNTKVDKKVEPKSCDKTHTCPPCPAPELLGGPSVFLFPPKPKDTLMISRTPEVTCVVVDVSHEDPEVKFNWYVDGVEVHNAKTKPREEQYNSTYRVVSVLTVLHQDWLNGKEYKCKVSNKMLPAPIEKTISKAKGQPREPQVYTLPPSRDELTKNQVSLTCLVKGFYPSDIAVEWESNGQPENNYKTTPPVLDSDGSFFLYSKLTVDKSRWQQGNVFSCSVMHEALHNHYTQKSLSLSPGK

SEQ ID NO: 879 - protein, 248 aa, Artificial
  Synthetic
CNVNHKPSNTKVDKKVEPKSCDKTHTCPPCPAPELLGGPSVFLFPPKPKDTLMISRTPEVTCVVVDVSHEDPEVKFNWYVDGVEVHNAKTKPREEQYNSTYRVVSVLTVLHQDWLNGKEYKCKVSNKYLPAPIEKTISKAKGQPREPQVYTLPPSRDELTKNQVSLTCLVKGFYPSDIAVEWESNGQPENNYKTTPPVLDSDGSFFLYSKLTVDKSRWQQGNVFSCSVMHEALHNHYTQKSLSLSPGK

SEQ ID NO: 880 - protein, 248 aa, Artificial
  Synthetic
CNVNHKPSNTKVDKKVEPKSCDKTHTCPPCPAPELLGGPSVFLFPPKPKDTLMISRTPEVTCVVVDVSHEDPEVKFNWYVDGVEVHNAKTKPREEQYNSTYRVVSVLTVLHQDWLNGKEYKCKVSNKWLPAPIEKTISKAKGQPREPQVYTLPPSRDELTKNQVSLTCLVKGFYPSDIAVEWESNGQPENNYKTTPPVLDSDGSFFLYSKLTVDKSRWQQGNVFSCSVMHEALHNHYTQKSLSLSPGK

SEQ ID NO: 881 - protein, 248 aa, Artificial
  Synthetic
CNVNHKPSNTKVDKKVEPKSCDKTHTCPPCPAPELLGGPSVFLFPPKPKDTLMISRTPEVTCVVVDVSHEDPEVKFNWYVDGVEVHNAKTKPREEQYNSTYRVVSVLTVLHQDWLNGKEYKCKVSNKPLPAPIEKTISKAKGQPREPQVYTLPPSRDELTKNQVSLTCLVKGFYPSDIAVEWESNGQPENNYKTTPPVLDSDGSFFLYSKLTVDKSRWQQGNVFSCSVMHEALHNHYTQKSLSLSPGK

SEQ ID NO: 882 - protein, 248 aa, Artificial
  Synthetic
CNVNHKPSNTKVDKKVEPKSCDKTHTCPPCPAPELLGGPSVFLFPPKPKDTLMISRTPEVTCVVVDVSHEDPEVKFNWYVDGVEVHNAKTKPREEQYNSTYRVVSVLTVLHQDWLNGKEYKCKVSNKADPAPIEKTISKAKGQPREPQVYTLPPSRDELTKNQVSLTCLVKGFYPSDIAVEWESNGQPENNYKTTPPVLDSDGSFFLYSKLTVDKSRWQQGNVFSCSVMHEALHNHYTQKSLSLSPGK

SEQ ID NO: 883 - protein, 248 aa, Artificial
  Synthetic
CNVNHKPSNTKVDKKVEPKSCDKTHTCPPCPAPELLGGPSVFLFPPKPKDTLMISRTPEVTCVVVDVSHEDPEVKFNWYVDGVEVHNAKTKPREEQYNSTYRVVSVLTVLHQDWLNGKEYKCKVSNKAQPAPIEKTISKAKGQPREPQVYTLPPSRDELTKNQVSLTCLVKGFYPSDIAVEWESNGQPENNYKTTPPVLDSDGSFFLYSKLTVDKSRWQQGNVFSCSVMHEALHNHYTQKSLSLSPGK

SEQ ID NO: 884 - protein, 248 aa, Artificial
  Synthetic
CNVNHKPSNTKVDKKVEPKSCDKTHTCPPCPAPELLGGPSVFLFPPKPKDTLMISRTPEVTCVVVDVSHEDPEVKFNWYVDGVEVHNAKTKPREEQYNSTYRVVSVLTVLHQDWLNGKEYKCKVSNKAKPAPIEKTISKAKGQPREPQVYTLPPSRDELTKNQVSLTCLVKGFYPSDIAVEWESNGQPENNYKTTPPVLDSDGSFFLYSKLTVDKSRWQQGNVFSCSVMHEALHNHYTQKSLSLSPGK

SEQ ID NO: 885 - protein, 248 aa, Artificial
  Synthetic
CNVNHKPSNTKVDKKVEPKSCDKTHTCPPCPAPELLGGPSVFLFPPKPKDTLMISRTPEVTCVVVDVSHEDPEVKFNWYVDGVEVHNAKTKPREEQYNSTYRVVSVLTVLHQDWLNGKEYKCKVSNKARPAPIEKTISKAKGQPREPQVYTLPPSRDELTKNQVSLTCLVKGFYPSDIAVEWESNGQPENNYKTTPPVLDSDGSFFLYSKLTVDKSRWQQGNVFSCSVMHEALHNHYTQKSLSLSPGK

SEQ ID NO: 886 - protein, 248 aa, Artificial
  Synthetic
CNVNHKPSNTKVDKKVEPKSCDKTHTCPPCPAPELLGGPSVFLFPPKPKDTLMISRTPEVTCVVVDVSHEDPEVKFNWYVDGVEVHNAKTKPREEQYNSTYRVVSVLTVLHQDWLNGKEYKCKVSNKASPAPIEKTISKAKGQPREPQVYTLPPSRDELTKNQVSLTCLVKGFYPSDIAVEWESNGQPENNYKTTPPVLDSDGSFFLYSKLTVDKSRWQQGNVFSCSVMHEALHNHYTQKSLSLSPGK

SEQ ID NO: 887 - protein, 248 aa, Artificial
  Synthetic
CNVNHKPSNTKVDKKVEPKSCDKTHTCPPCPAPELLGGPSVFLFPPKPKDTLMISRTPEVTCVVVDVSHEDPEVKFNWYVDGVEVHNAKTKPREEQYNSTYRVVSVLTVLHQDWLNGKEYKCKVSNKATPAPIEKTISKAKGQPREPQVYTLPPSRDELTKNQVSLTCLVKGFYPSDIAVEWESNGQPENNYKTTPPVLDSDGSFFLYSKLTVDKSRWQQGNVFSCSVMHEALHNHYTQKSLSLSPGK

SEQ ID NO: 888 - protein, 248 aa, Artificial
  Synthetic
CNVNHKPSNTKVDKKVEPKSCDKTHTCPPCPAPELLGGPSVFLFPPKPKDTLMISRTPEVTCVVVDVSHEDPEVKFNWYVDGVEVHNAKTKPREEQYNSTYRVVSVLTVLHQDWLNGKEYKCKVSNKAVPAPIEKTISKAKGQPREPQVYTLPPSRDELTKNQVSLTCLVKGFYPSDIAVEWESNGQPENNYKTTPPVLDSDGSFFLYSKLTVDKSRWQQGNVFSCSVMHEALHNHYTQKSLSLSPGK

SEQ ID NO: 889 - protein, 248 aa, Artificial
  Synthetic
CNVNHKPSNTKVDKKVEPKSCDKTHTCPPCPAPELLGGPSVFLFPPKPKDTLMISRTPEVTCVVVDVSHEDPEVKFNWYVDGVEVHNAKTKPREEQYNSTYRVVSVLTVLHQDWLNGKEYKCKVSNKAIPAPIEKTISKAKGQPREPQVYTLPPSRDELTKNQVSLTCLVKGFYPSDIAVEWESNGQPENNYKTTPPVLDSDGSFFLYSKLTVDKSRWQQGNVFSCSVMHEALHNHYTQKSLSLSPGK

SEQ ID NO: 890 - protein, 248 aa, Artificial
  Synthetic
CNVNHKPSNTKVDKKVEPKSCDKTHTCPPCPAPELLGGPSVFLFPPKPKDTLMISRTPEVTCVVVDVSHEDPEVKFNWYVDGVEVHNAKTKPREEQYNSTYRVVSVLTVLHQDWLNGKEYKCKVSNKAYPAPIEKTISKAKGQPREPQVYTLPPSRDELTKNQVSLTCLVKGFYPSDIAVEWESNGQPENNYKTTPPVLDSDGSFFLYSKLTVDKSRWQQGNVFSCSVMHEALHNHYTQKSLSLSPGK

SEQ ID NO: 891 - protein, 248 aa, Artificial
  Synthetic
CNVNHKPSNTKVDKKVEPKSCDKTHTCPPCPAPELLGGPSVFLFPPKPKDTLMISRTPEVTCVVVDVSHEDPEVKFNWYVDGVEVHNAKTKPREEQYNSTYRVVSVLTVLHQDWLNGKEYKCKVSNKAWPAPIEKTISKAKGQPREPQVYTLPPSRDELTKNQVSLTCLVKGFYPSDIAVEWESNGQPENNYKTTPPVLDSDGSFFLYSKLTVDKSRWQQGNVFSCSVMHEALHNHYTQKSLSLSPGK

SEQ ID NO: 892 - protein, 248 aa, Artificial
  Synthetic
CNVNHKPSNTKVDKKVEPKSCDKTHTCPPCPAPELLGGPSVFLFPPKPKDTLMISRTPEVTCVVVDVSHEDPEVKFNWYVDGVEVHNAKTKPREEQYNSTYRVVSVLTVLHQDWLNGKEYKCKVSNKAPPAPIEKTISKAKGQPREPQVYTLPPSRDELTKNQVSLTCLVKGFYPSDIAVEWESNGQPENNYKTTPPVLDSDGSFFLYSKLTVDKSRWQQGNVFSCSVMHEALHNHYTQKSLSLSPGK

SEQ ID NO: 893 - protein, 248 aa, Artificial
  Synthetic
CNVNHKPSNTKVDKKVEPKSCDKTHTCPPCPAPELLGGPSVFLFPPKPKDTLMISRTPEVTCVVVDVSHEDPEVKFNWYVDGVEVHNAKTKPREEQYNSTYRVVSVLTVLHQDWLNGKEYKCKVSNKAGPAPIEKTISKAKGQPREPQVYTLPPSRDELTKNQVSLTCLVKGFYPSDIAVEWESNGQPENNYKTTPPVLDSDGSFFLYSKLTVDKSRWQQGNVFSCSVMHEALHNHYTQKSLSLSPGK

SEQ ID NO: 894 - protein, 248 aa, Artificial
  Synthetic
CNVNHKPSNTKVDKKVEPKSCDKTHTCPPCPAPELLGGPSVFLFPPKPKDTLMISRTPEVTCVVVDVSHEDPEVKFNWYVDGVEVHNAKTKPREEQYNSTYRVVSVLTVLHQDWLNGKEYKCKVSNKALDAPIEKTISKAKGQPREPQVYTLPPSRDELTKNQVSLTCLVKGFYPSDIAVEWESNGQPENNYKTTPPVLDSDGSFFLYSKLTVDKSRWQQGNVFSCSVMHEALHNHYTQKSLSLSPGK

SEQ ID NO: 895 - protein, 248 aa, Artificial; identical to SEQ ID NO: 459
  Synthetic

SEQ ID NO: 896 - protein, 248 aa, Artificial
  Synthetic
CNVNHKPSNTKVDKKVEPKSCDKTHTCPPCPAPELLGGPSVFLFPPKPKDTLMISRTPEVTCVVVDVSHEDPEVKFNWYVDGVEVHNAKTKPREEQYNSTYRVVSVLTVLHQDWLNGKEYKCKVSNKALNAPIEKTISKAKGQPREPQVYTLPPSRDELTKNQVSLTCLVKGFYPSDIAVEWESNGQPENNYKTTPPVLDSDGSFFLYSKLTVDKSRWQQGNVFSCSVMHEALHNHYTQKSLSLSPGK

SEQ ID NO: 897 - protein, 248 aa, Artificial
  Synthetic
CNVNHKPSNTKVDKKVEPKSCDKTHTCPPCPAPELLGGPSVFLFPPKPKDTLMISRTPEVTCVVVDVSHEDPEVKFNWYVDGVEVHNAKTKPREEQYNSTYRVVSVLTVLHQDWLNGKEYKCKVSNKALQAPIEKTISKAKGQPREPQVYTLPPSRDELTKNQVSLTCLVKGFYPSDIAVEWESNGQPENNYKTTPPVLDSDGSFFLYSKLTVDKSRWQQGNVFSCSVMHEALHNHYTQKSLSLSPGK

SEQ ID NO: 898 - protein, 248 aa, Artificial
  Synthetic
CNVNHKPSNTKVDKKVEPKSCDKTHTCPPCPAPELLGGPSVFLFPPKPKDTLMISRTPEVTCVVVDVSHEDPEVKFNWYVDGVEVHNAKTKPREEQYNSTYRVVSVLTVLHQDWLNGKEYKCKVSNKALKAPIEKTISKAKGQPREPQVYTLPPSRDELTKNQVSLTCLVKGFYPSDIAVEWESNGQPENNYKTTPPVLDSDGSFFLYSKLTVDKSRWQQGNVFSCSVMHEALHNHYTQKSLSLSPGK

SEQ ID NO: 899 - protein, 248 aa, Artificial
  Synthetic
CNVNHKPSNTKVDKKVEPKSCDKTHTCPPCPAPELLGGPSVFLFPPKPKDTLMISRTPEVTCVVVDVSHEDPEVKFNWYVDGVEVHNAKTKPREEQYNSTYRVVSVLTVLHQDWLNGKEYKCKVSNKALRAPIEKTISKAKGQPREPQVYTLPPSRDELTKNQVSLTCLVKGFYPSDIAVEWESNGQPENNYKTTPPVLDSDGSFFLYSKLTVDKSRWQQGNVFSCSVMHEALHNHYTQKSLSLSPGK

SEQ ID NO: 900 - protein, 248 aa, Artificial
  Synthetic
CNVNHKPSNTKVDKKVEPKSCDKTHTCPPCPAPELLGGPSVFLFPPKPKDTLMISRTPEVTCVVVDVSHEDPEVKFNWYVDGVEVHNAKTKPREEQYNSTYRVVSVLTVLHQDWLNGKEYKCKVSNKALSAPIEKTISKAKGQPREPQVYTLPPSRDELTKNQVSLTCLVKGFYPSDIAVEWESNGQPENNYKTTPPVLDSDGSFFLYSKLTVDKSRWQQGNVFSCSVMHEALHNHYTQKSLSLSPGK

SEQ ID NO: 901 - protein, 248 aa, Artificial
  Synthetic
CNVNHKPSNTKVDKKVEPKSCDKTHTCPPCPAPELLGGPSVFLFPPKPKDTLMISRTPEVTCVVVDVSHEDPEVKFNWYVDGVEVHNAKTKPREEQYNSTYRVVSVLTVLHQDWLNGKEYKCKVSNKALTAPIEKTISKAKGQPREPQVYTLPPSRDELTKNQVSLTCLVKGFYPSDIAVEWESNGQPENNYKTTPPVLDSDGSFFLYSKLTVDKSRWQQGNVFSCSVMHEALHNHYTQKSLSLSPGK

SEQ ID NO: 902 - protein, 248 aa, Artificial
  Synthetic
CNVNHKPSNTKVDKKVEPKSCDKTHTCPPCPAPELLGGPSVFLFPPKPKDTLMISRTPEVTCVVVDVSHEDPEVKFNWYVDGVEVHNAKTKPREEQYNSTYRVVSVLTVLHQDWLNGKEYKCKVSNKALHAPIEKTISKAKGQPREPQVYTLPPSRDELTKNQVSLTCLVKGFYPSDIAVEWESNGQPENNYKTTPPVLDSDGSFFLYSKLTVDKSRWQQGNVFSCSVMHEALHNHYTQKSLSLSPGK

SEQ ID NO: 903 - protein, 248 aa, Artificial
  Synthetic
CNVNHKPSNTKVDKKVEPKSCDKTHTCPPCPAPELLGGPSVFLFPPKPKDTLMISRTPEVTCVVVDVSHEDPEVKFNWYVDGVEVHNAKTKPREEQYNSTYRVVSVLTVLHQDWLNGKEYKCKVSNKALVAPIEKTISKAKGQPREPQVYTLPPSRDELTKNQVSLTCLVKGFYPSDIAVEWESNGQPENNYKTTPPVLDSDGSFFLYSKLTVDKSRWQQGNVFSCSVMHEALHNHYTQKSLSLSPGK

SEQ ID NO: 904 - protein, 248 aa, Artificial
  Synthetic
CNVNHKPSNTKVDKKVEPKSCDKTHTCPPCPAPELLGGPSVFLFPPKPKDTLMISRTPEVTCVVVDVSHEDPEVKFNWYVDGVEVHNAKTKPREEQYNSTYRVVSVLTVLHQDWLNGKEYKCKVSNKALLAPIEKTISKAKGQPREPQVYTLPPSRDELTKNQVSLTCLVKGFYPSDIAVEWESNGQPENNYKTTPPVLDSDGSFFLYSKLTVDKSRWQQGNVFSCSVMHEALHNHYTQKSLSLSPGK

SEQ ID NO: 905 - protein, 248 aa, Artificial
  Synthetic
CNVNHKPSNTKVDKKVEPKSCDKTHTCPPCPAPELLGGPSVFLFPPKPKDTLMISRTPEVTCVVVDVSHEDPEVKFNWYVDGVEVHNAKTKPREEQYNSTYRVVSVLTVLHQDWLNGKEYKCKVSNKALIAPIEKTISKAKGQPREPQVYTLPPSRDELTKNQVSLTCLVKGFYPSDIAVEWESNGQPENNYKTTPPVLDSDGSFFLYSKLTVDKSRWQQGNVFSCSVMHEALHNHYTQKSLSLSPGK

SEQ ID NO: 906 - protein, 248 aa, Artificial
  Synthetic
CNVNHKPSNTKVDKKVEPKSCDKTHTCPPCPAPELLGGPSVFLFPPKPKDTLMISRTPEVTCVVVDVSHEDPEVKFNWYVDGVEVHNAKTKPREEQYNSTYRVVSVLTVLHQDWLNGKEYKCKVSNKALMAPIEKTISKAKGQPREPQVYTLPPSRDELTKNQVSLTCLVKGFYPSDIAVEWESNGQPENNYKTTPPVLDSDGSFFLYSKLTVDKSRWQQGNVFSCSVMHEALHNHYTQKSLSLSPGK

SEQ ID NO: 907 - protein, 248 aa, Artificial
  Synthetic
CNVNHKPSNTKVDKKVEPKSCDKTHTCPPCPAPELLGGPSVFLFPPKPKDTLMISRTPEVTCVVVDVSHEDPEVKFNWYVDGVEVHNAKTKPREEQYNSTYRVVSVLTVLHQDWLNGKEYKCKVSNKALYAPIEKTISKAKGQPREPQVYTLPPSRDELTKNQVSLTCLVKGFYPSDIAVEWESNGQPENNYKTTPPVLDSDGSFFLYSKLTVDKSRWQQGNVFSCSVMHEALHNHYTQKSLSLSPGK

SEQ ID NO: 908 - protein, 248 aa, Artificial
  Synthetic
CNVNHKPSNTKVDKKVEPKSCDKTHTCPPCPAPELLGGPSVFLFPPKPKDTLMISRTPEVTCVVVDVSHEDPEVKFNWYVDGVEVHNAKTKPREEQYNSTYRVVSVLTVLHQDWLNGKEYKCKVSNKALWAPIEKTISKAKGQPREPQVYTLPPSRDELTKNQVSLTCLVKGFYPSDIAVEWESNGQPENNYKTTPPVLDSDGSFFLYSKLTVDKSRWQQGNVFSCSVMHEALHNHYTQKSLSLSPGK

SEQ ID NO: 909 - protein, 248 aa, Artificial
  Synthetic
CNVNHKPSNTKVDKKVEPKSCDKTHTCPPCPAPELLGGPSVFLFPPKPKDTLMISRTPEVTCVVVDVSHEDPEVKFNWYVDGVEVHNAKTKPREEQYNSTYRVVSVLTVLHQDWLNGKEYKCKVSNKALGAPIEKTISKAKGQPREPQVYTLPPSRDELTKNQVSLTCLVKGFYPSDIAVEWESNGQPENNYKTTPPVLDSDGSFFLYSKLTVDKSRWQQGNVFSCSVMHEALHNHYTQKSLSLSPGK

SEQ ID NO: 910 - protein, 248 aa, Artificial
  Synthetic
CNVNHKPSNTKVDKKVEPKSCDKTHTCPPCPAPELLGGPSVFLFPPKPKDTLMISRTPEVTCVVVDVSHEDPEVKFNWYVDGVEVHNAKTKPREEQYNSTYRVVSVLTVLHQDWLNGKEYKCKVSNKALPADIEKTISKAKGQPREPQVYTLPPSRDELTKNQVSLTCLVKGFYPSDIAVEWESNGQPENNYKTTPPVLDSDGSFFLYSKLTVDKSRWQQGNVFSCSVMHEALHNHYTQKSLSLSPGK

SEQ ID NO: 911 - protein, 248 aa, Artificial
  Synthetic
CNVNHKPSNTKVDKKVEPKSCDKTHTCPPCPAPELLGGPSVFLFPPKPKDTLMISRTPEVTCVVVDVSHEDPEVKFNWYVDGVEVHNAKTKPREEQYNSTYRVVSVLTVLHQDWLNGKEYKCKVSNKALPAQIEKTISKAKGQPREPQVYTLPPSRDELTKNQVSLTCLVKGFYPSDIAVEWESNGQPENNYKTTPPVLDSDGSFFLYSKLTVDKSRWQQGNVFSCSVMHEALHNHYTQKSLSLSPGK

SEQ ID NO: 912 - protein, 248 aa, Artificial
  Synthetic
CNVNHKPSNTKVDKKVEPKSCDKTHTCPPCPAPELLGGPSVFLFPPKPKDTLMISRTPEVTCVVVDVSHEDPEVKFNWYVDGVEVHNAKTKPREEQYNSTYRVVSVLTVLHQDWLNGKEYKCKVSNKALPARIEKTISKAKGQPREPQVYTLPPSRDELTKNQVSLTCLVKGFYPSDIAVEWESNGQPENNYKTTPPVLDSDGSFFLYSKLTVDKSRWQQGNVFSCSVMHEALHNHYTQKSLSLSPGK

SEQ ID NO: 913 - protein, 248 aa, Artificial
  Synthetic
CNVNHKPSNTKVDKKVEPKSCDKTHTCPPCPAPELLGGPSVFLFPPKPKDTLMISRTPEVTCVVVDVSHEDPEVKFNWYVDGVEVHNAKTKPREEQYNSTYRVVSVLTVLHQDWLNGKEYKCKVSNKALPATIEKTISKAKGQPREPQVYTLPPSRDELTKNQVSLTCLVKGFYPSDIAVEWESNGQPENNYKTTPPVLDSDGSFFLYSKLTVDKSRWQQGNVFSCSVMHEALHNHYTQKSLSLSPGK

SEQ ID NO: 914 - protein, 248 aa, Artificial
  Synthetic
CNVNHKPSNTKVDKKVEPKSCDKTHTCPPCPAPELLGGPSVFLFPPKPKDTLMISRTPEVTCVVVDVSHEDPEVKFNWYVDGVEVHNAKTKPREEQYNSTYRVVSVLTVLHQDWLNGKEYKCKVSNKALPALIEKTISKAKGQPREPQVYTLPPSRDELTKNQVSLTCLVKGFYPSDIAVEWESNGQPENNYKTTPPVLDSDGSFFLYSKLTVDKSRWQQGNVFSCSVMHEALHNHYTQKSLSLSPGK

SEQ ID NO: 915 - protein, 248 aa, Artificial
  Synthetic
CNVNHKPSNTKVDKKVEPKSCDKTHTCPPCPAPELLGGPSVFLFPPKPKDTLMISRTPEVTCVVVDVSHEDPEVKFNWYVDGVEVHNAKTKPREEQYNSTYRVVSVLTVLHQDWLNGKEYKCKVSNKALPAIIEKTISKAKGQPREPQVYTLPPSRDELTKNQVSLTCLVKGFYPSDIAVEWESNGQPENNYKTTPPVLDSDGSFFLYSKLTVDKSRWQQGNVFSCSVMHEALHNHYTQKSLSLSPGK

SEQ ID NO: 916 - protein, 248 aa, Artificial
  Synthetic
CNVNHKPSNTKVDKKVEPKSCDKTHTCPPCPAPELLGGPSVFLFPPKPKDTLMISRTPEVTCVVVDVSHEDPEVKFNWYVDGVEVHNAKTKPREEQYNSTYRVVSVLTVLHQDWLNGKEYKCKVSNKALPAFIEKTISKAKGQPREPQVYTLPPSRDELTKNQVSLTCLVKGFYPSDIAVEWESNGQPENNYKTTPPVLDSDGSFFLYSKLTVDKSRWQQGNVFSCSVMHEALHNHYTQKSLSLSPGK

SEQ ID NO: 917 - protein, 248 aa, Artificial
  Synthetic
CNVNHKPSNTKVDKKVEPKSCDKTHTCPPCPAPELLGGPSVFLFPPKPKDTLMISRTPEVTCVVVDVSHEDPEVKFNWYVDGVEVHNAKTKPREEQYNSTYRVVSVLTVLHQDWLNGKEYKCKVSNKALPAMIEKTISKAKGQPREPQVYTLPPSRDELTKNQVSLTCLVKGFYPSDIAVEWESNGQPENNYKTTPPVLDSDGSFFLYSKLTVDKSRWQQGNVFSCSVMHEALHNHYTQKSLSLSPGK

SEQ ID NO: 918 - protein, 248 aa, Artificial
  Synthetic
CNVNHKPSNTKVDKKVEPKSCDKTHTCPPCPAPELLGGPSVFLFPPKPKDTLMISRTPEVTCVVVDVSHEDPEVKFNWYVDGVEVHNAKTKPREEQYNSTYRVVSVLTVLHQDWLNGKEYKCKVSNKALPAYIEKTISKAKGQPREPQVYTLPPSRDELTKNQVSLTCLVKGFYPSDIAVEWESNGQPENNYKTTPPVLDSDGSFFLYSKLTVDKSRWQQGNVFSCSVMHEALHNHYTQKSLSLSPGK

SEQ ID NO: 919 - protein, 248 aa, Artificial
  Synthetic
CNVNHKPSNTKVDKKVEPKSCDKTHTCPPCPAPELLGGPSVFLFPPKPKDTLMISRTPEVTCVVVDVSHEDPEVKFNWYVDGVEVHNAKTKPREEQYNSTYRVVSVLTVLHQDWLNGKEYKCKVSNKALPAWIEKTISKAKGQPREPQVYTLPPSRDELTKNQVSLTCLVKGFYPSDIAVEWESNGQPENNYKTTPPVLDSDGSFFLYSKLTVDKSRWQQGNVFSCSVMHEALHNHYTQKSLSLSPGK

SEQ ID NO: 920 - protein, 248 aa, Artificial
  Synthetic
CNVNHKPSNTKVDKKVEPKSCDKTHTCPPCPAPELLGGPSVFLFPPKPKDTLMISRTPEVTCVVVDVSHEDPEVKFNWYVDGVEVHNAKTKPREEQYNSTYRVVSVLTVLHQDWLNGKEYKCKVSNKALPAPILKTISKAKGQPREPQVYTLPPSRDELTKNQVSLTCLVKGFYPSDIAVEWESNGQPENNYKTTPPVLDSDGSFFLYSKLTVDKSRWQQGNVFSCSVMHEALHNHYTQKSLSLSPGK

SEQ ID NO: 921 - protein, 248 aa, Artificial
  Synthetic
CNVNHKPSNTKVDKKVEPKSCDKTHTCPPCPAPELLGGPSVFLFPPKPKDTLMISRTPEVTCVVVDVSHEDPEVKFNWYVDGVEVHNAKTKPREEQYNSTYRVVSVLTVLHQDWLNGKEYKCKVSNKALPAPIFKTISKAKGQPREPQVYTLPPSRDELTKNQVSLTCLVKGFYPSDIAVEWESNGQPENNYKTTPPVLDSDGSFFLYSKLTVDKSRWQQGNVFSCSVMHEALHNHYTQKSLSLSPGK

SEQ ID NO: 922 - protein, 248 aa, Artificial
  Synthetic
CNVNHKPSNTKVDKKVEPKSCDKTHTCPPCPAPELLGGPSVFLFPPKPKDTLMISRTPEVTCVVVDVSHEDPEVKFNWYVDGVEVHNAKTKPREEQYNSTYRVVSVLTVLHQDWLNGKEYKCKVSNKALPAPIMKTISKAKGQPREPQVYTLPPSRDELTKNQVSLTCLVKGFYPSDIAVEWESNGQPENNYKTTPPVLDSDGSFFLYSKLTVDKSRWQQGNVFSCSVMHEALHNHYTQKSLSLSPGK

SEQ ID NO: 923 - protein, 248 aa, Artificial
  Synthetic
CNVNHKPSNTKVDKKVEPKSCDKTHTCPPCPAPELLGGPSVFLFPPKPKDTLMISRTPEVTCVVVDVSHEDPEVKFNWYVDGVEVHNAKTKPREEQYNSTYRVVSVLTVLHQDWLNGKEYKCKVSNKALPAPIPKTISKAKGQPREPQVYTLPPSRDELTKNQVSLTCLVKGFYPSDIAVEWESNGQPENNYKTTPPVLDSDGSFFLYSKLTVDKSRWQQGNVFSCSVMHEALHNHYTQKSLSLSPGK

SEQ ID NO: 924 - protein, 248 aa, Artificial
  Synthetic
CNVNHKPSNTKVDKKVEPKSCDKTHTCPPCPAPELLGGPSVFLFPPKPKDTLMISRTPEVTCVVVDVSHEDPEVKFNWYVDGVEVHNAKTKPREEQYNSTYRVVSVLTVLHQDWLNGKEYKCKVSNKALPAPIEPTISKAKGQPREPQVYTLPPSRDELTKNQVSLTCLVKGFYPSDIAVEWESNGQPENNYKTTPPVLDSDGSFFLYSKLTVDKSRWQQGNVFSCSVMHEALHNHYTQKSLSLSPGK

SEQ ID NO: 925 - protein, 248 aa, Artificial
  Synthetic
CNVNHKPSNTKVDKKVEPKSCDETHTCPPCPAPELLGGPSVFLFPPKPKDTLMISRTPEVTCVVVDVSHEDPEVKFNWYVDGVEVHNAKTKPREEQYNSTYRVVSVLTVLHQDWLNGKEYKCKVSNKALPAPIEKTISKAKGQPREPQVYTLPPSRDELTKNQVSLTCLVKGFYPSDIAVEWESNGQPENNYKTTPPVLDSDGSFFLYSKLTVDKSRWQQGNVFSCSVMHEALHNHYTQKSLSLSPGK

SEQ ID NO: 926 - protein, 248 aa, Artificial
  Synthetic
CNVNHKPSNTKVDKKVEPKSCDYTHTCPPCPAPELLGGPSVFLFPPKPKDTLMISRTPEVTCVVVDVSHEDPEVKFNWYVDGVEVHNAKTKPREEQYNSTYRVVSVLTVLHQDWLNGKEYKCKVSNKALPAPIEKTISKAKGQPREPQVYTLPPSRDELTKNQVSLTCLVKGFYPSDIAVEWESNGQPENNYKTTPPVLDSDGSFFLYSKLTVDKSRWQQGNVFSCSVMHEALHNHYTQKSLSLSPGK

SEQ ID NO: 927 - protein, 248 aa, Artificial
  Synthetic
CNVNHKPSNTKVDKKVEPKSCDKTHTCPPCPAPELLGGPSVFLEPPKPKDTLMISRTPEVTCVVVDVSHEDPEVKFNWYVDGVEVHNAKTKPREEQYNSTYRVVSVLTVLHQDWLNGKEYKCKVSNKALPAPIEKTISKAKGQPREPQVYTLPPSRDELTKNQVSLTCLVKGFYPSDIAVEWESNGQPENNYKTTPPVLDSDGSFFLYSKLTVDKSRWQQGNVFSCSVMHEALHNHYTQKSLSLSPGK

SEQ ID NO: 928 - protein, 248 aa, Artificial
  Synthetic
CNVNHKPSNTKVDKKVEPKSCDKTHTCPPCPAPELLGGPSVFLFPPKPKDTLMISRTPEVTCVVVDVSHERPEVKFNWYVDGVEVHNAKTKPREEQYNSTYRVVSVLTVLHQDWLNGKEYKCKVSNKALPAPIEKTISKAKGQPREPQVYTLPPSRDELTKNQVSLTCLVKGFYPSDIAVEWESNGQPENNYKTTPPVLDSDGSFFLYSKLTVDKSRWQQGNVFSCSVMHEALHNHYTQKSLSLSPGK

SEQ ID NO: 929 - protein, 248 aa, Artificial
  Synthetic
CNVNHKPSNTKVDKKVEPKSCDKTHTCPPCPAPELLGGPSVFLFPPKPKDTLMISRTPEVTCVVVDVSHESPEVKFNWYVDGVEVHNAKTKPREEQYNSTYRVVSVLTVLHQDWLNGKEYKCKVSNKALPAPIEKTISKAKGQPREPQVYTLPPSRDELTKNQVSLTCLVKGFYPSDIAVEWESNGQPENNYKTTPPVLDSDGSFFLYSKLTVDKSRWQQGNVFSCSVMHEALHNHYTQKSLSLSPGK

SEQ ID NO: 930 - protein, 248 aa, Artificial
  Synthetic
CNVNHKPSNTKVDKKVEPKSCDKTHTCPPCPAPELLGGPSVFLFPPKPKDTLMISRTPEVTCVVVDVSHELPEVKFNWYVDGVEVHNAKTKPREEQYNSTYRVVSVLTVLHQDWLNGKEYKCKVSNKALPAPIEKTISKAKGQPREPQVYTLPPSRDELTKNQVSLTCLVKGFYPSDIAVEWESNGQPENNYKTTPPVLDSDGSFFLYSKLTVDKSRWQQGNVFSCSVMHEALHNHYTQKSLSLSPGK

SEQ ID NO: 931 - protein, 248 aa, Artificial
  Synthetic
CNVNHKPSNTKVDKKVEPKSCDKTHTCPPCPAPELLGGPSVFLFPPKPKDTLMISRTPEVTCVVVDVSHEIPEVKFNWYVDGVEVHNAKTKPREEQYNSTYRVVSVLTVLHQDWLNGKEYKCKVSNKALPAPIEKTISKAKGQPREPQVYTLPPSRDELTKNQVSLTCLVKGFYPSDIAVEWESNGQPENNYKTTPPVLDSDGSFFLYSKLTVDKSRWQQGNVFSCSVMHEALHNHYTQKSLSLSPGK

SEQ ID NO: 932 - protein, 248 aa, Artificial
  Synthetic
CNVNHKPSNTKVDKKVEPKSCDKTHTCPPCPAPELLGGPSVFLFPPKPKDTLMISRTPEVTCVVVDVSHEFPEVKFNWYVDGVEVHNAKTKPREEQYNSTYRVVSVLTVLHQDWLNGKEYKCKVSNKALPAPIEKTISKAKGQPREPQVYTLPPSRDELTKNQVSLTCLVKGFYPSDIAVEWESNGQPENNYKTTPPVLDSDGSFFLYSKLTVDKSRWQQGNVFSCSVMHEALHNHYTQKSLSLSPGK

SEQ ID NO: 933 - protein, 248 aa, Artificial
  Synthetic
CNVNHKPSNTKVDKKVEPKSCDKTHTCPPCPAPELLGGPSVFLFPPKPKDTLMISRTPEVTCVVVDVSHEMPEVKFNWYVDGVEVHNAKTKPREEQYNSTYRVVSVLTVLHQDWLNGKEYKCKVSNKALPAPIEKTISKAKGQPREPQVYTLPPSRDELTKNQVSLTCLVKGFYPSDIAVEWESNGQPENNYKTTPPVLDSDGSFFLYSKLTVDKSRWQQGNVFSCSVMHEALHNHYTQKSLSLSPGK

SEQ ID NO: 934 - protein, 248 aa, Artificial
  Synthetic
CNVNHKPSNTKVDKKVEPKSCDKTHTCPPCPAPELLGGPSVFLFPPKPKDTLMISRTPEVTCVVVDVSHEYPEVKFNWYVDGVEVHNAKTKPREEQYNSTYRVVSVLTVLHQDWLNGKEYKCKVSNKALPAPIEKTISKAKGQPREPQVYTLPPSRDELTKNQVSLTCLVKGFYPSDIAVEWESNGQPENNYKTTPPVLDSDGSFFLYSKLTVDKSRWQQGNVFSCSVMHEALHNHYTQKSLSLSPGK

SEQ ID NO: 935 - protein, 248 aa, Artificial
  Synthetic
CNVNHKPSNTKVDKKVEPKSCDKTHTCPPCPAPELLGGPSVFLFPPKPKDTLMISRTPEVTCVVVDVSHEWPEVKFNWYVDGVEVHNAKTKPREEQYNSTYRVVSVLTVLHQDWLNGKEYKCKVSNKALPAPIEKTISKAKGQPREPQVYTLPPSRDELTKNQVSLTCLVKGFYPSDIAVEWESNGQPENNYKTTPPVLDSDGSFFLYSKLTVDKSRWQQGNVFSCSVMHEALHNHYTQKSLSLSPGK

SEQ ID NO: 936 - protein, 248 aa, Artificial
  Synthetic
CNVNHKPSNTKVDKKVEPKSCDKTHTCPPCPAPELLGGPSVFLFPPKPKDTLMISRTPEVTCVVVDVSHEPPEVKFNWYVDGVEVHNAKTKPREEQYNSTYRVVSVLTVLHQDWLNGKEYKCKVSNKALPAPIEKTISKAKGQPREPQVYTLPPSRDELTKNQVSLTCLVKGFYPSDIAVEWESNGQPENNYKTTPPVLDSDGSFFLYSKLTVDKSRWQQGNVFSCSVMHEALHNHYTQKSLSLSPGK

SEQ ID NO: 937 - protein, 248 aa, Artificial
  Synthetic
CNVNHKPSNTKVDKKVEPKSCDKTHTCPPCPAPELLGGPSVFLFPPKPKDTLMISRTPEVTCVVVDVSHEGPEVKFNWYVDGVEVHNAKTKPREEQYNSTYRVVSVLTVLHQDWLNGKEYKCKVSNKALPAPIEKTISKAKGQPREPQVYTLPPSRDELTKNQVSLTCLVKGFYPSDIAVEWESNGQPENNYKTTPPVLDSDGSFFLYSKLTVDKSRWQQGNVFSCSVMHEALHNHYTQKSLSLSPGK

SEQ ID NO: 938 - protein, 248 aa, Artificial
  Synthetic
CNVNHKPSNTKVDKKVEPKSCDKTHTCPPCPAPELLGGPSVFLFPPKPKDTLMISRTPEVTCVVVDVSHEDDEVKFNWYVDGVEVHNAKTKPREEQYNSTYRVVSVLTVLHQDWLNGKEYKCKVSNKALPAPIEKTISKAKGQPREPQVYTLPPSRDELTKNQVSLTCLVKGFYPSDIAVEWESNGQPENNYKTTPPVLDSDGSFFLYSKLTVDKSRWQQGNVFSCSVMHEALHNHYTQKSLSLSPGK

SEQ ID NO: 939 - protein, 248 aa, Artificial
  Synthetic
CNVNHKPSNTKVDKKVEPKSCDKTHTCPPCPAPELLGGPSVFLFPPKPKDTLMISRTPEVTCVVVDVSHEDEEVKFNWYVDGVEVHNAKTKPREEQYNSTYRVVSVLTVLHQDWLNGKEYKCKVSNKALPAPIEKTISKAKGQPREPQVYTLPPSRDELTKNQVSLTCLVKGFYPSDIAVEWESNGQPENNYKTTPPVLDSDGSFFLYSKLTVDKSRWQQGNVFSCSVMHEALHNHYTQKSLSLSPGK

SEQ ID NO: 940 - protein, 248 aa, Artificial
  Synthetic
CNVNHKPSNTKVDKKVEPKSCDKTHTCPPCPAPELLGGPSVFLFPPKPKDTLMISRTPEVTCVVVDVSHEDNEVKFNWYVDGVEVHNAKTKPREEQYNSTYRVVSVLTVLHQDWLNGKEYKCKVSNKALPAPIEKTISKAKGQPREPQVYTLPPSRDELTKNQVSLTCLVKGFYPSDIAVEWESNGQPENNYKTTPPVLDSDGSFFLYSKLTVDKSRWQQGNVFSCSVMHEALHNHYTQKSLSLSPGK

SEQ ID NO: 941 - protein, 248 aa, Artificial
  Synthetic
CNVNHKPSNTKVDKKVEPKSCDKTHTCPPCPAPELLGGPSVFLFPPKPKDTLMISRTPEVTCVVVDVSHEDQEVKFNWYVDGVEVHNAKTKPREEQYNSTYRVVSVLTVLHQDWLNGKEYKCKVSNKALPAPIEKTISKAKGQPREPQVYTLPPSRDELTKNQVSLTCLVKGFYPSDIAVEWESNGQPENNYKTTPPVLDSDGSFFLYSKLTVDKSRWQQGNVFSCSVMHEALHNHYTQKSLSLSPGK

SEQ ID NO: 942 - protein, 248 aa, Artificial
  Synthetic
CNVNHKPSNTKVDKKVEPKSCDKTHTCPPCPAPELLGGPSVFLFPPKPKDTLMISRTPEVTCVVVDVSHEDKEVKFNWYVDGVEVHNAKTKPREEQYNSTYRVVSVLTVLHQDWLNGKEYKCKVSNKALPAPIEKTISKAKGQPREPQVYTLPPSRDELTKNQVSLTCLVKGFYPSDIAVEWESNGQPENNYKTTPPVLDSDGSFFLYSKLTVDKSRWQQGNVFSCSVMHEALHNHYTQKSLSLSPGK

SEQ ID NO: 943 - protein, 248 aa, Artificial
  Synthetic
CNVNHKPSNTKVDKKVEPKSCDKTHTCPPCPAPELLGGPSVFLFPPKPKDTLMISRTPEVTCVVVDVSHEDREVKFNWYVDGVEVHNAKTKPREEQYNSTYRVVSVLTVLHQDWLNGKEYKCKVSNKALPAPIEKTISKAKGQPREPQVYTLPPSRDELTKNQVSLTCLVKGFYPSDIAVEWESNGQPENNYKTTPPVLDSDGSFFLYSKLTVDKSRWQQGNVFSCSVMHEALHNHYTQKSLSLSPGK

SEQ ID NO: 944 - protein, 248 aa, Artificial
  Synthetic
CNVNHKPSNTKVDKKVEPKSCDKTHTCPPCPAPELLGGPSVFLFPPKPKDTLMISRTPEVTCVVVDVSHEDSEVKFNWYVDGVEVHNAKTKPREEQYNSTYRVVSVLTVLHQDWLNGKEYKCKVSNKALPAPIEKTISKAKGQPREPQVYTLPPSRDELTKNQVSLTCLVKGFYPSDIAVEWESNGQPENNYKTTPPVLDSDGSFFLYSKLTVDKSRWQQGNVFSCSVMHEALHNHYTQKSLSLSPGK

SEQ ID NO: 945 - protein, 248 aa, Artificial
  Synthetic
CNVNHKPSNTKVDKKVEPKSCDKTHTCPPCPAPELLGGPSVFLFPPKPKDTLMISRTPEVTCVVVDVSHEDTEVKFNWYVDGVEVHNAKTKPREEQYNSTYRVVSVLTVLHQDWLNGKEYKCKVSNKALPAPIEKTISKAKGQPREPQVYTLPPSRDELTKNQVSLTCLVKGFYPSDIAVEWESNGQPENNYKTTPPVLDSDGSFFLYSKLTVDKSRWQQGNVFSCSVMHEALHNHYTQKSLSLSPGK

SEQ ID NO: 946 - protein, 248 aa, Artificial
  Synthetic
CNVNHKPSNTKVDKKVEPKSCDKTHTCPPCPAPELLGGPSVFLFPPKPKDTLMISRTPEVTCVVVDVSHEDHEVKFNWYVDGVEVHNAKTKPREEQYNSTYRVVSVLTVLHQDWLNGKEYKCKVSNKALPAPIEKTISKAKGQPREPQVYTLPPSRDELTKNQVSLTCLVKGFYPSDIAVEWESNGQPENNYKTTPPVLDSDGSFFLYSKLTVDKSRWQQGNVFSCSVMHEALHNHYTQKSLSLSPGK

SEQ ID NO: 947 - protein, 248 aa, Artificial
  Synthetic
CNVNHKPSNTKVDKKVEPKSCDKTHTCPPCPAPELLGGPSVFLFPPKPKDTLMISRTPEVTCVVVDVSHEDAEVKFNWYVDGVEVHNAKTKPREEQYNSTYRVVSVLTVLHQDWLNGKEYKCKVSNKALPAPIEKTISKAKGQPREPQVYTLPPSRDELTKNQVSLTCLVKGFYPSDIAVEWESNGQPENNYKTTPPVLDSDGSFFLYSKLTVDKSRWQQGNVFSCSVMHEALHNHYTQKSLSLSPGK

SEQ ID NO: 948 - protein, 248 aa, Artificial
  Synthetic
CNVNHKPSNTKVDKKVEPKSCDKTHTCPPCPAPELLGGPSVFLFPPKPKDTLMISRTPEVTCVVVDVSHEDVEVKFNWYVDGVEVHNAKTKPREEQYNSTYRVVSVLTVLHQDWLNGKEYKCKVSNKALPAPIEKTISKAKGQPREPQVYTLPPSRDELTKNQVSLTCLVKGFYPSDIAVEWESNGQPENNYKTTPPVLDSDGSFFLYSKLTVDKSRWQQGNVFSCSVMHEALHNHYTQKSLSLSPGK

SEQ ID NO: 949 - protein, 248 aa, Artificial
  Synthetic
CNVNHKPSNTKVDKKVEPKSCDKTHTCPPCPAPELLGGPSVFLFPPKPKDTLMISRTPEVTCVVVDVSHEDLEVKFNWYVDGVEVHNAKTKPREEQYNSTYRVVSVLTVLHQDWLNGKEYKCKVSNKALPAPIEKTISKAKGQPREPQVYTLPPSRDELTKNQVSLTCLVKGFYPSDIAVEWESNGQPENNYKTTPPVLDSDGSFFLYSKLTVDKSRWQQGNVFSCSVMHEALHNHYTQKSLSLSPGK

SEQ ID NO: 950 - protein, 248 aa, Artificial
  Synthetic
CNVNHKPSNTKVDKKVEPKSCDKTHTCPPCPAPELLGGPSVFLFPPKPKDTLMISRTPEVTCVVVDVSHEDIEVKFNWYVDGVEVHNAKTKPREEQYNSTYRVVSVLTVLHQDWLNGKEYKCKVSNKALPAPIEKTISKAKGQPREPQVYTLPPSRDELTKNQVSLTCLVKGFYPSDIAVEWESNGQPENNYKTTPPVLDSDGSFFLYSKLTVDKSRWQQGNVFSCSVMHEALHNHYTQKSLSLSPGK

SEQ ID NO: 951 - protein, 248 aa, Artificial
  Synthetic
CNVNHKPSNTKVDKKVEPKSCDKTHTCPPCPAPELLGGPSVFLFPPKPKDTLMISRTPEVTCVVVDVSHEDFEVKFNWYVDGVEVHNAKTKPREEQYNSTYRVVSVLTVLHQDWLNGKEYKCKVSNKALPAPIEKTISKAKGQPREPQVYTLPPSRDELTKNQVSLTCLVKGFYPSDIAVEWESNGQPENNYKTTPPVLDSDGSFFLYSKLTVDKSRWQQGNVFSCSVMHEALHNHYTQKSLSLSPGK

SEQ ID NO: 952 - protein, 248 aa, Artificial
  Synthetic
CNVNHKPSNTKVDKKVEPKSCDKTHTCPPCPAPELLGGPSVFLFPPKPKDTLMISRTPEVTCVVVDVSHEDMEVKFNWYVDGVEVHNAKTKPREEQYNSTYRVVSVLTVLHQDWLNGKEYKCKVSNKALPAPIEKTISKAKGQPREPQVYTLPPSRDELTKNQVSLTCLVKGFYPSDIAVEWESNGQPENNYKTTPPVLDSDGSFFLYSKLTVDKSRWQQGNVFSCSVMHEALHNHYTQKSLSLSPGK

SEQ ID NO: 953 - protein, 248 aa, Artificial
  Synthetic
CNVNHKPSNTKVDKKVEPKSCDKTHTCPPCPAPELLGGPSVFLFPPKPKDTLMISRTPEVTCVVVDVSHEDYEVKFNWYVDGVEVHNAKTKPREEQYNSTYRVVSVLTVLHQDWLNGKEYKCKVSNKALPAPIEKTISKAKGQPREPQVYTLPPSRDELTKNQVSLTCLVKGFYPSDIAVEWESNGQPENNYKTTPPVLDSDGSFFLYSKLTVDKSRWQQGNVFSCSVMHEALHNHYTQKSLSLSPGK

SEQ ID NO: 954 - protein, 248 aa, Artificial
  Synthetic
CNVNHKPSNTKVDKKVEPKSCDKTHTCPPCPAPELLGGPSVFLFPPKPKDTLMISRTPEVTCVVVDVSHEDWEVKFNWYVDGVEVHNAKTKPREEQYNSTYRVVSVLTVLHQDWLNGKEYKCKVSNKALPAPIEKTISKAKGQPREPQVYTLPPSRDELTKNQVSLTCLVKGFYPSDIAVEWESNGQPENNYKTTPPVLDSDGSFFLYSKLTVDKSRWQQGNVFSCSVMHEALHNHYTQKSLSLSPGK

SEQ ID NO: 955 - protein, 248 aa, Artificial
  Synthetic
CNVNHKPSNTKVDKKVEPKSCDKTHTCPPCPAPELLGGPSVFLFPPKPKDTLMISRTPEVTCVVVDVSHEDGEVKFNWYVDGVEVHNAKTKPREEQYNSTYRVVSVLTVLHQDWLNGKEYKCKVSNKALPAPIEKTISKAKGQPREPQVYTLPPSRDELTKNQVSLTCLVKGFYPSDIAVEWESNGQPENNYKTTPPVLDSDGSFFLYSKLTVDKSRWQQGNVFSCSVMHEALHNHYTQKSLSLSPGK

SEQ ID NO: 956 - protein, 248 aa, Artificial
  Synthetic
CNVNHKPSNTKVDKKVEPKSCDKTHTCPPCPAPELLGGPSVFLFPPKPKDTLMISRTPEVTCVVVDVSHEDPEVKFNWYVKGVEVHNAKTKPREEQYNSTYRVVSVLTVLHQDWLNGKEYKCKVSNKALPAPIEKTISKAKGQPREPQVYTLPPSRDELTKNQVSLTCLVKGFYPSDIAVEWESNGQPENNYKTTPPVLDSDGSFFLYSKLTVDKSRWQQGNVFSCSVMHEALHNHYTQKSLSLSPGK

SEQ ID NO: 957 - protein, 248 aa, Artificial
  Synthetic
CNVNHKPSNTKVDKKVEPKSCDKTHTCPPCPAPELLGGPSVFLFPPKPKDTLMISRTPEVTCVVVDVSHEDPEVKFNWYVLGVEVHNAKTKPREEQYNSTYRVVSVLTVLHQDWLNGKEYKCKVSNKALPAPIEKTISKAKGQPREPQVYTLPPSRDELTKNQVSLTCLVKGFYPSDIAVEWESNGQPENNYKTTPPVLDSDGSFFLYSKLTVDKSRWQQGNVFSCSVMHEALHNHYTQKSLSLSPGK

SEQ ID NO: 958 - protein, 248 aa, Artificial
  Synthetic
CNVNHKPSNTKVDKKVEPKSCDKTHTCPPCPAPELLGGPSVFLFPPKPKDTLMISRTPEVTCVVVDVSHEDPEVKFNWYVWGVEVHNAKTKPREEQYNSTYRVVSVLTVLHQDWLNGKEYKCKVSNKALPAPIEKTISKAKGQPREPQVYTLPPSRDELTKNQVSLTCLVKGFYPSDIAVEWESNGQPENNYKTTPPVLDSDGSFFLYSKLTVDKSRWQQGNVFSCSVMHEALHNHYTQKSLSLSPGK

SEQ ID NO: 959 - protein, 248 aa, Artificial
  Synthetic
CNVNHKPSNTKVDKKVEPKSCDKTHTCPPCPAPELLGGPSVFLFPPKPKDTLMISRTPEVTCVVVDVSHEDPEVKFNWYVPGVEVHNAKTKPREEQYNSTYRVVSVLTVLHQDWLNGKEYKCKVSNKALPAPIEKTISKAKGQPREPQVYTLPPSRDELTKNQVSLTCLVKGFYPSDIAVEWESNGQPENNYKTTPPVLDSDGSFFLYSKLTVDKSRWQQGNVFSCSVMHEALHNHYTQKSLSLSPGK

SEQ ID NO: 960 - protein, 248 aa, Artificial
  Synthetic
CNVNHKPSNTKVDKKVEPKSCDKTHTCPPCPAPELLGGPSVFLFPPKPKDTLMISRTPEVTCVVVDVSHEDPEVKFNWYVGGVEVHNAKTKPREEQYNSTYRVVSVLTVLHQDWLNGKEYKCKVSNKALPAPIEKTISKAKGQPREPQVYTLPPSRDELTKNQVSLTCLVKGFYPSDIAVEWESNGQPENNYKTTPPVLDSDGSFFLYSKLTVDKSRWQQGNVFSCSVMHEALHNHYTQKSLSLSPGK

SEQ ID NO: 961 - protein, 248 aa, Artificial
  Synthetic
CNVNHKPSNTKVDKKVEPKSCDKTHTCPPCPAPELLGGPSVFLFPPKPKDTLMISRTPEVTCVVVDVSHEDPEVKFNWYVDGVEVHNAKTDPREEQYNSTYRVVSVLTVLHQDWLNGKEYKCKVSNKALPAPIEKTISKAKGQPREPQVYTLPPSRDELTKNQVSLTCLVKGFYPSDIAVEWESNGQPENNYKTTPPVLDSDGSFFLYSKLTVDKSRWQQGNVFSCSVMHEALHNHYTQKSLSLSPGK

SEQ ID NO: 962 - protein, 248 aa, Artificial
  Synthetic
CNVNHKPSNTKVDKKVEPKSCDKTHTCPPCPAPELLGGPSVFLFPPKPKDTLMISRTPEVTCVVVDVSHEDPEVKFNWYVDGVEVHNAKTNPREEQYNSTYRVVSVLTVLHQDWLNGKEYKCKVSNKALPAPIEKTISKAKGQPREPQVYTLPPSRDELTKNQVSLTCLVKGFYPSDIAVEWESNGQPENNYKTTPPVLDSDGSFFLYSKLTVDKSRWQQGNVFSCSVMHEALHNHYTQKSLSLSPGK

SEQ ID NO: 963 - protein, 248 aa, Artificial
  Synthetic
CNVNHKPSNTKVDKKVEPKSCDKTHTCPPCPAPELLGGPSVFLFPPKPKDTLMISRTPEVTCVVVDVSHEDPEVKFNWYVDGVEVHNAKTHPREEQYNSTYRVVSVLTVLHQDWLNGKEYKCKVSNKALPAPIEKTISKAKGQPREPQVYTLPPSRDELTKNQVSLTCLVKGFYPSDIAVEWESNGQPENNYKTTPPVLDSDGSFFLYSKLTVDKSRWQQGNVFSCSVMHEALHNHYTQKSLSLSPGK

SEQ ID NO: 964 - protein, 248 aa, Artificial
  Synthetic
CNVNHKPSNTKVDKKVEPKSCDKTHTCPPCPAPELLGGPSVFLFPPKPKDTLMISRTPEVTCVVVDVSHEDPEVKFNWYVDGVEVHNAKTLPREEQYNSTYRVVSVLTVLHQDWLNGKEYKCKVSNKALPAPIEKTISKAKGQPREPQVYTLPPSRDELTKNQVSLTCLVKGFYPSDIAVEWESNGQPENNYKTTPPVLDSDGSFFLYSKLTVDKSRWQQGNVFSCSVMHEALHNHYTQKSLSLSPGK

SEQ ID NO: 965 - protein, 248 aa, Artificial
  Synthetic
CNVNHKPSNTKVDKKVEPKSCDKTHTCPPCPAPELLGGPSVFLFPPKPKDTLMISRTPEVTCVVVDVSHEDPEVKFNWYVDGVEVHNAKTWPREEQYNSTYRVVSVLTVLHQDWLNGKEYKCKVSNKALPAPIEKTISKAKGQPREPQVYTLPPSRDELTKNQVSLTCLVKGFYPSDIAVEWESNGQPENNYKTTPPVLDSDGSFFLYSKLTVDKSRWQQGNVFSCSVMHEALHNHYTQKSLSLSPGK

SEQ ID NO: 966 - protein, 248 aa, Artificial
  Synthetic
CNVNHKPSNTKVDKKVEPKSCDKTHTCPPCPAPELLGGPSVFLFPPKPKDTLMISRTPEVTCVVVDVSHEDPEVKFNWYVDGVEVHNAKTKPRNEQYNSTYRVVSVLTVLHQDWLNGKEYKCKVSNKALPAPIEKTISKAKGQPREPQVYTLPPSRDELTKNQVSLTCLVKGFYPSDIAVEWESNGQPENNYKTTPPVLDSDGSFFLYSKLTVDKSRWQQGNVFSCSVMHEALHNHYTQKSLSLSPGK

SEQ ID NO: 967 - protein, 248 aa, Artificial
  Synthetic
CNVNHKPSNTKVDKKVEPKSCDKTHTCPPCPAPELLGGPSVFLFPPKPKDTLMISRTPEVTCVVVDVSHEDPEVKFNWYVDGVEVHNAKTKPRREQYNSTYRVVSVLTVLHQDWLNGKEYKCKVSNKALPAPIEKTISKAKGQPREPQVYTLPPSRDELTKNQVSLTCLVKGFYPSDIAVEWESNGQPENNYKTTPPVLDSDGSFFLYSKLTVDKSRWQQGNVFSCSVMHEALHNHYTQKSLSLSPGK

SEQ ID NO: 968 - protein, 248 aa, Artificial
  Synthetic
CNVNHKPSNTKVDKKVEPKSCDKTHTCPPCPAPELLGGPSVFLFPPKPKDTLMISRTPEVTCVVVDVSHEDPEVKFNWYVDGVEVHNAKTKPRSEQYNSTYRVVSVLTVLHQDWLNGKEYKCKVSNKALPAPIEKTISKAKGQPREPQVYTLPPSRDELTKNQVSLTCLVKGFYPSDIAVEWESNGQPENNYKTTPPVLDSDGSFFLYSKLTVDKSRWQQGNVFSCSVMHEALHNHYTQKSLSLSPGK

SEQ ID NO: 969 - protein, 248 aa, Artificial
  Synthetic
CNVNHKPSNTKVDKKVEPKSCDKTHTCPPCPAPELLGGPSVFLFPPKPKDTLMISRTPEVTCVVVDVSHEDPEVKFNWYVDGVEVHNAKTKPRTEQYNSTYRVVSVLTVLHQDWLNGKEYKCKVSNKALPAPIEKTISKAKGQPREPQVYTLPPSRDELTKNQVSLTCLVKGFYPSDIAVEWESNGQPENNYKTTPPVLDSDGSFFLYSKLTVDKSRWQQGNVFSCSVMHEALHNHYTQKSLSLSPGK

SEQ ID NO: 970 - protein, 248 aa, Artificial
  Synthetic
CNVNHKPSNTKVDKKVEPKSCDKTHTCPPCPAPELLGGPSVFLFPPKPKDTLMISRTPEVTCVVVDVSHEDPEVKFNWYVDGVEVHNAKTKPRHEQYNSTYRVVSVLTVLHQDWLNGKEYKCKVSNKALPAPIEKTISKAKGQPREPQVYTLPPSRDELTKNQVSLTCLVKGFYPSDIAVEWESNGQPENNYKTTPPVLDSDGSFFLYSKLTVDKSRWQQGNVFSCSVMHEALHNHYTQKSLSLSPGK

SEQ ID NO: 971 - protein, 248 aa, Artificial
  Synthetic
CNVNHKPSNTKVDKKVEPKSCDKTHTCPPCPAPELLGGPSVFLFPPKPKDTLMISRTPEVTCVVVDVSHEDPEVKFNWYVDGVEVHNAKTKPRVEQYNSTYRVVSVLTVLHQDWLNGKEYKCKVSNKALPAPIEKTISKAKGQPREPQVYTLPPSRDELTKNQVSLTCLVKGFYPSDIAVEWESNGQPENNYKTTPPVLDSDGSFFLYSKLTVDKSRWQQGNVFSCSVMHEALHNHYTQKSLSLSPGK

SEQ ID NO: 972 - protein, 248 aa, Artificial
  Synthetic
CNVNHKPSNTKVDKKVEPKSCDKTHTCPPCPAPELLGGPSVFLFPPKPKDTLMISRTPEVTCVVVDVSHEDPEVKFNWYVDGVEVHNAKTKPRLEQYNSTYRVVSVLTVLHQDWLNGKEYKCKVSNKALPAPIEKTISKAKGQPREPQVYTLPPSRDELTKNQVSLTCLVKGFYPSDIAVEWESNGQPENNYKTTPPVLDSDGSFFLYSKLTVDKSRWQQGNVFSCSVMHEALHNHYTQKSLSLSPGK

SEQ ID NO: 973 - protein, 248 aa, Artificial
  Synthetic
CNVNHKPSNTKVDKKVEPKSCDKTHTCPPCPAPELLGGPSVFLFPPKPKDTLMISRTPEVTCVVVDVSHEDPEVKFNWYVDGVEVHNAKTKPRIEQYNSTYRVVSVLTVLHQDWLNGKEYKCKVSNKALPAPIEKTISKAKGQPREPQVYTLPPSRDELTKNQVSLTCLVKGFYPSDIAVEWESNGQPENNYKTTPPVLDSDGSFFLYSKLTVDKSRWQQGNVFSCSVMHEALHNHYTQKSLSLSPGK

SEQ ID NO: 974 - protein, 248 aa, Artificial
  Synthetic
CNVNHKPSNTKVDKKVEPKSCDKTHTCPPCPAPELLGGPSVFLFPPKPKDTLMISRTPEVTCVVVDVSHEDPEVKFNWYVDGVEVHNAKTKPRFEQYNSTYRVVSVLTVLHQDWLNGKEYKCKVSNKALPAPIEKTISKAKGQPREPQVYTLPPSRDELTKNQVSLTCLVKGFYPSDIAVEWESNGQPENNYKTTPPVLDSDGSFFLYSKLTVDKSRWQQGNVFSCSVMHEALHNHYTQKSLSLSPGK

SEQ ID NO: 975 - protein, 248 aa, Artificial
  Synthetic
CNVNHKPSNTKVDKKVEPKSCDKTHTCPPCPAPELLGGPSVFLFPPKPKDTLMISRTPEVTCVVVDVSHEDPEVKFNWYVDGVEVHNAKTKPRMEQYNSTYRVVSVLTVLHQDWLNGKEYKCKVSNKALPAPIEKTISKAKGQPREPQVYTLPPSRDELTKNQVSLTCLVKGFYPSDIAVEWESNGQPENNYKTTPPVLDSDGSFFLYSKLTVDKSRWQQGNVFSCSVMHEALHNHYTQKSLSLSPGK

SEQ ID NO: 976 - protein, 248 aa, Artificial
  Synthetic
CNVNHKPSNTKVDKKVEPKSCDKTHTCPPCPAPELLGGPSVFLFPPKPKDTLMISRTPEVTCVVVDVSHEDPEVKFNWYVDGVEVHNAKTKPRYEQYNSTYRVVSVLTVLHQDWLNGKEYKCKVSNKALPAPIEKTISKAKGQPREPQVYTLPPSRDELTKNQVSLTCLVKGFYPSDIAVEWESNGQPENNYKTTPPVLDSDGSFFLYSKLTVDKSRWQQGNVFSCSVMHEALHNHYTQKSLSLSPGK

SEQ ID NO: 977 - protein, 248 aa, Artificial
  Synthetic
CNVNHKPSNTKVDKKVEPKSCDKTHTCPPCPAPELLGGPSVFLFPPKPKDTLMISRTPEVTCVVVDVSHEDPEVKFNWYVDGVEVHNAKTKPRWEQYNSTYRVVSVLTVLHQDWLNGKEYKCKVSNKALPAPIEKTISKAKGQPREPQVYTLPPSRDELTKNQVSLTCLVKGFYPSDIAVEWESNGQPENNYKTTPPVLDSDGSFFLYSKLTVDKSRWQQGNVFSCSVMHEALHNHYTQKSLSLSPGK

SEQ ID NO: 978 - protein, 248 aa, Artificial
  Synthetic
CNVNHKPSNTKVDKKVEPKSCDKTHTCPPCPAPELLGGPSVFLFPPKPKDTLMISRTPEVTCVVVDVSHEDPEVKFNWYVDGVEVHNAKTKPRPEQYNSTYRVVSVLTVLHQDWLNGKEYKCKVSNKALPAPIEKTISKAKGQPREPQVYTLPPSRDELTKNQVSLTCLVKGFYPSDIAVEWESNGQPENNYKTTPPVLDSDGSFFLYSKLTVDKSRWQQGNVFSCSVMHEALHNHYTQKSLSLSPGK

SEQ ID NO: 979 - protein, 248 aa, Artificial
  Synthetic
CNVNHKPSNTKVDKKVEPKSCDKTHTCPPCPAPELLGGPSVFLFPPKPKDTLMISRTPEVTCVVVDVSHEDPEVKFNWYVDGVEVHNAKTKPRGEQYNSTYRVVSVLTVLHQDWLNGKEYKCKVSNKALPAPIEKTISKAKGQPREPQVYTLPPSRDELTKNQVSLTCLVKGFYPSDIAVEWESNGQPENNYKTTPPVLDSDGSFFLYSKLTVDKSRWQQGNVFSCSVMHEALHNHYTQKSLSLSPGK

SEQ ID NO: 980 - protein, 248 aa, Artificial
  Synthetic
CNVNHKPSNTKVDKKVEPKSCDKTHTCPPCPAPELLGGPSVFLFPPKPKDTLMISRTPEVTCVVVDVSHEDPEVKFNWYVDGVEVHNAKTKPREKQYNSTYRVVSVLTVLHQDWLNGKEYKCKVSNKALPAPIEKTISKAKGQPREPQVYTLPPSRDELTKNQVSLTCLVKGFYPSDIAVEWESNGQPENNYKTTPPVLDSDGSFFLYSKLTVDKSRWQQGNVFSCSVMHEALHNHYTQKSLSLSPGK

SEQ ID NO: 981 - protein, 248 aa, Artificial
  Synthetic
CNVNHKPSNTKVDKKVEPKSCDKTHTCPPCPAPELLGGPSVFLFPPKPKDTLMISRTPEVTCVVVDVSHEDPEVKFNWYVDGVEVHNAKTKPRERQYNSTYRVVSVLTVLHQDWLNGKEYKCKVSNKALPAPIEKTISKAKGQPREPQVYTLPPSRDELTKNQVSLTCLVKGFYPSDIAVEWESNGQPENNYKTTPPVLDSDGSFFLYSKLTVDKSRWQQGNVFSCSVMHEALHNHYTQKSLSLSPGK

SEQ ID NO: 982 - protein, 248 aa, Artificial
  Synthetic
CNVNHKPSNTKVDKKVEPKSCDKTHTCPPCPAPELLGGPSVFLFPPKPKDTLMISRTPEVTCVVVDVSHEDPEVKFNWYVDGVEVHNAKTKPRESQYNSTYRVVSVLTVLHQDWLNGKEYKCKVSNKALPAPIEKTISKAKGQPREPQVYTLPPSRDELTKNQVSLTCLVKGFYPSDIAVEWESNGQPENNYKTTPPVLDSDGSFFLYSKLTVDKSRWQQGNVFSCSVMHEALHNHYTQKSLSLSPGK

SEQ ID NO: 983 - protein, 248 aa, Artificial
  Synthetic
CNVNHKPSNTKVDKKVEPKSCDKTHTCPPCPAPELLGGPSVFLFPPKPKDTLMISRTPEVTCVVVDVSHEDPEVKFNWYVDGVEVHNAKTKPRETQYNSTYRVVSVLTVLHQDWLNGKEYKCKVSNKALPAPIEKTISKAKGQPREPQVYTLPPSRDELTKNQVSLTCLVKGFYPSDIAVEWESNGQPENNYKTTPPVLDSDGSFFLYSKLTVDKSRWQQGNVFSCSVMHEALHNHYTQKSLSLSPGK

SEQ ID NO: 984 - protein, 248 aa, Artificial
  Synthetic
CNVNHKPSNTKVDKKVEPKSCDKTHTCPPCPAPELLGGPSVFLFPPKPKDTLMISRTPEVTCVVVDVSHEDPEVKFNWYVDGVEVHNAKTKPREHQYNSTYRVVSVLTVLHQDWLNGKEYKCKVSNKALPAPIEKTISKAKGQPREPQVYTLPPSRDELTKNQVSLTCLVKGFYPSDIAVEWESNGQPENNYKTTPPVLDSDGSFFLYSKLTVDKSRWQQGNVFSCSVMHEALHNHYTQKSLSLSPGK

SEQ ID NO: 985 - protein, 248 aa, Artificial
  Synthetic
CNVNHKPSNTKVDKKVEPKSCDKTHTCPPCPAPELLGGPSVFLFPPKPKDTLMISRTPEVTCVVVDVSHEDPEVKFNWYVDGVEVHNAKTKPREVQYNSTYRVVSVLTVLHQDWLNGKEYKCKVSNKALPAPIEKTISKAKGQPREPQVYTLPPSRDELTKNQVSLTCLVKGFYPSDIAVEWESNGQPENNYKTTPPVLDSDGSFFLYSKLTVDKSRWQQGNVFSCSVMHEALHNHYTQKSLSLSPGK

SEQ ID NO: 986 - protein, 248 aa, Artificial
  Synthetic
CNVNHKPSNTKVDKKVEPKSCDKTHTCPPCPAPELLGGPSVFLFPPKPKDTLMISRTPEVTCVVVDVSHEDPEVKFNWYVDGVEVHNAKTKPRELQYNSTYRVVSVLTVLHQDWLNGKEYKCKVSNKALPAPIEKTISKAKGQPREPQVYTLPPSRDELTKNQVSLTCLVKGFYPSDIAVEWESNGQPENNYKTTPPVLDSDGSFFLYSKLTVDKSRWQQGNVFSCSVMHEALHNHYTQKSLSLSPGK

SEQ ID NO: 987 - protein, 248 aa, Artificial
  Synthetic
CNVNHKPSNTKVDKKVEPKSCDKTHTCPPCPAPELLGGPSVFLFPPKPKDTLMISRTPEVTCVVVDVSHEDPEVKFNWYVDGVEVHNAKTKPREIQYNSTYRVVSVLTVLHQDWLNGKEYKCKVSNKALPAPIEKTISKAKGQPREPQVYTLPPSRDELTKNQVSLTCLVKGFYPSDIAVEWESNGQPENNYKTTPPVLDSDGSFFLYSKLTVDKSRWQQGNVFSCSVMHEALHNHYTQKSLSLSPGK

SEQ ID NO: 988 - protein, 248 aa, Artificial
  Synthetic
CNVNHKPSNTKVDKKVEPKSCDKTHTCPPCPAPELLGGPSVFLFPPKPKDTLMISRTPEVTCVVVDVSHEDPEVKFNWYVDGVEVHNAKTKPREFQYNSTYRVVSVLTVLHQDWLNGKEYKCKVSNKALPAPIEKTISKAKGQPREPQVYTLPPSRDELTKNQVSLTCLVKGFYPSDIAVEWESNGQPENNYKTTPPVLDSDGSFFLYSKLTVDKSRWQQGNVFSCSVMHEALHNHYTQKSLSLSPGK

SEQ ID NO: 989 - protein, 248 aa, Artificial
  Synthetic
CNVNHKPSNTKVDKKVEPKSCDKTHTCPPCPAPELLGGPSVFLFPPKPKDTLMISRTPEVTCVVVDVSHEDPEVKFNWYVDGVEVHNAKTKPREMQYNSTYRVVSVLTVLHQDWLNGKEYKCKVSNKALPAPIEKTISKAKGQPREPQVYTLPPSRDELTKNQVSLTCLVKGFYPSDIAVEWESNGQPENNYKTTPPVLDSDGSFFLYSKLTVDKSRWQQGNVFSCSVMHEALHNHYTQKSLSLSPGK

SEQ ID NO: 990 - protein, 248 aa, Artificial
  Synthetic
CNVNHKPSNTKVDKKVEPKSCDKTHTCPPCPAPELLGGPSVFLFPPKPKDTLMISRTPEVTCVVVDVSHEDPEVKFNWYVDGVEVHNAKTKPREYQYNSTYRVVSVLTVLHQDWLNGKEYKCKVSNKALPAPIEKTISKAKGQPREPQVYTLPPSRDELTKNQVSLTCLVKGFYPSDIAVEWESNGQPENNYKTTPPVLDSDGSFFLYSKLTVDKSRWQQGNVFSCSVMHEALHNHYTQKSLSLSPGK

SEQ ID NO: 991 - protein, 248 aa, Artificial
  Synthetic
CNVNHKPSNTKVDKKVEPKSCDKTHTCPPCPAPELLGGPSVFLFPPKPKDTLMISRTPEVTCVVVDVSHEDPEVKFNWYVDGVEVHNAKTKPREWQYNSTYRVVSVLTVLHQDWLNGKEYKCKVSNKALPAPIEKTISKAKGQPREPQVYTLPPSRDELTKNQVSLTCLVKGFYPSDIAVEWESNGQPENNYKTTPPVLDSDGSFFLYSKLTVDKSRWQQGNVFSCSVMHEALHNHYTQKSLSLSPGK

SEQ ID NO: 992 - protein, 248 aa, Artificial
  Synthetic
CNVNHKPSNTKVDKKVEPKSCDKTHTCPPCPAPELLGGPSVFLFPPKPKDTLMISRTPEVTCVVVDVSHEDPEVKFNWYVDGVEVHNAKTKPREPQYNSTYRVVSVLTVLHQDWLNGKEYKCKVSNKALPAPIEKTISKAKGQPREPQVYTLPPSRDELTKNQVSLTCLVKGFYPSDIAVEWESNGQPENNYKTTPPVLDSDGSFFLYSKLTVDKSRWQQGNVFSCSVMHEALHNHYTQKSLSLSPGK

SEQ ID NO: 993 - protein, 248 aa, Artificial
  Synthetic
CNVNHKPSNTKVDKKVEPKSCDKTHTCPPCPAPELLGGPSVFLFPPKPKDTLMISRTPEVTCVVVDVSHEDPEVKFNWYVDGVEVHNAKTKPREGQYNSTYRVVSVLTVLHQDWLNGKEYKCKVSNKALPAPIEKTISKAKGQPREPQVYTLPPSRDELTKNQVSLTCLVKGFYPSDIAVEWESNGQPENNYKTTPPVLDSDGSFFLYSKLTVDKSRWQQGNVFSCSVMHEALHNHYTQKSLSLSPGK

SEQ ID NO: 994 - protein, 248 aa, Artificial
  Synthetic
CNVNHKPSNTKVDKKVEPKSCDKTHTCPPCPAPELLGGPSVFLFPPKPKDTLMISRTPEVTCVVVDVSHEDPEVKFNWYVDGVEVHNAKTKPREEDYNSTYRVVSVLTVLHQDWLNGKEYKCKVSNKALPAPIEKTISKAKGQPREPQVYTLPPSRDELTKNQVSLTCLVKGFYPSDIAVEWESNGQPENNYKTTPPVLDSDGSFFLYSKLTVDKSRWQQGNVFSCSVMHEALHNHYTQKSLSLSPGK

SEQ ID NO: 995 - protein, 248 aa, Artificial
  Synthetic
CNVNHKPSNTKVDKKVEPKSCDKTHTCPPCPAPELLGGPSVFLFPPKPKDTLMISRTPEVTCVVVDVSHEDPEVKFNWYVDGVEVHNAKTKPREEEYNSTYRVVSVLTVLHQDWLNGKEYKCKVSNKALPAPIEKTISKAKGQPREPQVYTLPPSRDELTKNQVSLTCLVKGFYPSDIAVEWESNGQPENNYKTTPPVLDSDGSFFLYSKLTVDKSRWQQGNVFSCSVMHEALHNHYTQKSLSLSPGK

SEQ ID NO: 996 - protein, 248 aa, Artificial
  Synthetic
CNVNHKPSNTKVDKKVEPKSCDKTHTCPPCPAPELLGGPSVFLFPPKPKDTLMISRTPEVTCVVVDVSHEDPEVKFNWYVDGVEVHNAKTKPREENYNSTYRVVSVLTVLHQDWLNGKEYKCKVSNKALPAPIEKTISKAKGQPREPQVYTLPPSRDELTKNQVSLTCLVKGFYPSDIAVEWESNGQPENNYKTTPPVLDSDGSFFLYSKLTVDKSRWQQGNVFSCSVMHEALHNHYTQKSLSLSPGK

SEQ ID NO: 997 - protein, 248 aa, Artificial
  Synthetic
CNVNHKPSNTKVDKKVEPKSCDKTHTCPPCPAPELLGGPSVFLFPPKPKDTLMISRTPEVTCVVVDVSHEDPEVKFNWYVDGVEVHNAKTKPREERYNSTYRVVSVLTVLHQDWLNGKEYKCKVSNKALPAPIEKTISKAKGQPREPQVYTLPPSRDELTKNQVSLTCLVKGFYPSDIAVEWESNGQPENNYKTTPPVLDSDGSFFLYSKLTVDKSRWQQGNVFSCSVMHEALHNHYTQKSLSLSPGK

SEQ ID NO: 998 - protein, 248 aa, Artificial
  Synthetic
CNVNHKPSNTKVDKKVEPKSCDKTHTCPPCPAPELLGGPSVFLFPPKPKDTLMISRTPEVTCVVVDVSHEDPEVKFNWYVDGVEVHNAKTKPREESYNSTYRVVSVLTVLHQDWLNGKEYKCKVSNKALPAPIEKTISKAKGQPREPQVYTLPPSRDELTKNQVSLTCLVKGFYPSDIAVEWESNGQPENNYKTTPPVLDSDGSFFLYSKLTVDKSRWQQGNVFSCSVMHEALHNHYTQKSLSLSPGK

SEQ ID NO: 999 - protein, 248 aa, Artificial
  Synthetic
CNVNHKPSNTKVDKKVEPKSCDKTHTCPPCPAPELLGGPSVFLFPPKPKDTLMISRTPEVTCVVVDVSHEDPEVKFNWYVDGVEVHNAKTKPREETYNSTYRVVSVLTVLHQDWLNGKEYKCKVSNKALPAPIEKTISKAKGQPREPQVYTLPPSRDELTKNQVSLTCLVKGFYPSDIAVEWESNGQPENNYKTTPPVLDSDGSFFLYSKLTVDKSRWQQGNVFSCSVMHEALHNHYTQKSLSLSPGK

SEQ ID NO: 1000 - protein, 248 aa, Artificial
  Synthetic
CNVNHKPSNTKVDKKVEPKSCDKTHTCPPCPAPELLGGPSVFLFPPKPKDTLMISRTPEVTCVVVDVSHEDPEVKFNWYVDGVEVHNAKTKPREEHYNSTYRVVSVLTVLHQDWLNGKEYKCKVSNKALPAPIEKTISKAKGQPREPQVYTLPPSRDELTKNQVSLTCLVKGFYPSDIAVEWESNGQPENNYKTTPPVLDSDGSFFLYSKLTVDKSRWQQGNVFSCSVMHEALHNHYTQKSLSLSPGK

SEQ ID NO: 1001 - protein, 248 aa, Artificial
  Synthetic
CNVNHKPSNTKVDKKVEPKSCDKTHTCPPCPAPELLGGPSVFLFPPKPKDTLMISRTPEVTCVVVDVSHEDPEVKFNWYVDGVEVHNAKTKPREEVYNSTYRVVSVLTVLHQDWLNGKEYKCKVSNKALPAPIEKTISKAKGQPREPQVYTLPPSRDELTKNQVSLTCLVKGFYPSDIAVEWESNGQPENNYKTTPPVLDSDGSFFLYSKLTVDKSRWQQGNVFSCSVMHEALHNHYTQKSLSLSPGK

SEQ ID NO: 1002 - protein, 248 aa, Artificial
  Synthetic
CNVNHKPSNTKVDKKVEPKSCDKTHTCPPCPAPELLGGPSVFLFPPKPKDTLMISRTPEVTCVVVDVSHEDPEVKFNWYVDGVEVHNAKTKPREEIYNSTYRVVSVLTVLHQDWLNGKEYKCKVSNKALPAPIEKTISKAKGQPREPQVYTLPPSRDELTKNQVSLTCLVKGFYPSDIAVEWESNGQPENNYKTTPPVLDSDGSFFLYSKLTVDKSRWQQGNVFSCSVMHEALHNHYTQKSLSLSPGK

SEQ ID NO: 1003 - protein, 248 aa, Artificial
  Synthetic
CNVNHKPSNTKVDKKVEPKSCDKTHTCPPCPAPELLGGPSVFLFPPKPKDTLMISRTPEVTCVVVDVSHEDPEVKFNWYVDGVEVHNAKTKPREEFYNSTYRVVSVLTVLHQDWLNGKEYKCKVSNKALPAPIEKTISKAKGQPREPQVYTLPPSRDELTKNQVSLTCLVKGFYPSDIAVEWESNGQPENNYKTTPPVLDSDGSFFLYSKLTVDKSRWQQGNVFSCSVMHEALHNHYTQKSLSLSPGK

SEQ ID NO: 1004 - protein, 248 aa, Artificial
  Synthetic
CNVNHKPSNTKVDKKVEPKSCDKTHTCPPCPAPELLGGPSVFLFPPKPKDTLMISRTPEVTCVVVDVSHEDPEVKFNWYVDGVEVHNAKTKPREEMYNSTYRVVSVLTVLHQDWLNGKEYKCKVSNKALPAPIEKTISKAKGQPREPQVYTLPPSRDELTKNQVSLTCLVKGFYPSDIAVEWESNGQPENNYKTTPPVLDSDGSFFLYSKLTVDKSRWQQGNVFSCSVMHEALHNHYTQKSLSLSPGK

SEQ ID NO: 1005 - protein, 248 aa, Artificial
  Synthetic
CNVNHKPSNTKVDKKVEPKSCDKTHTCPPCPAPELLGGPSVFLFPPKPKDTLMISRTPEVTCVVVDVSHEDPEVKFNWYVDGVEVHNAKTKPREEYYNSTYRVVSVLTVLHQDWLNGKEYKCKVSNKALPAPIEKTISKAKGQPREPQVYTLPPSRDELTKNQVSLTCLVKGFYPSDIAVEWESNGQPENNYKTTPPVLDSDGSFFLYSKLTVDKSRWQQGNVFSCSVMHEALHNHYTQKSLSLSPGK

SEQ ID NO: 1006 - protein, 248 aa, Artificial
  Synthetic
CNVNHKPSNTKVDKKVEPKSCDKTHTCPPCPAPELLGGPSVFLFPPKPKDTLMISRTPEVTCVVVDVSHEDPEVKFNWYVDGVEVHNAKTKPREEWYNSTYRVVSVLTVLHQDWLNGKEYKCKVSNKALPAPIEKTISKAKGQPREPQVYTLPPSRDELTKNQVSLTCLVKGFYPSDIAVEWESNGQPENNYKTTPPVLDSDGSFFLYSKLTVDKSRWQQGNVFSCSVMHEALHNHYTQKSLSLSPGK

SEQ ID NO: 1007 - protein, 248 aa, Artificial
  Synthetic
CNVNHKPSNTKVDKKVEPKSCDKTHTCPPCPAPELLGGPSVFLFPPKPKDTLMISRTPEVTCVVVDVSHEDPEVKFNWYVDGVEVHNAKTKPREEPYNSTYRVVSVLTVLHQDWLNGKEYKCKVSNKALPAPIEKTISKAKGQPREPQVYTLPPSRDELTKNQVSLTCLVKGFYPSDIAVEWESNGQPENNYKTTPPVLDSDGSFFLYSKLTVDKSRWQQGNVFSCSVMHEALHNHYTQKSLSLSPGK

SEQ ID NO: 1008 - protein, 248 aa, Artificial
  Synthetic
CNVNHKPSNTKVDKKVEPKSCDKTHTCPPCPAPELLGGPSVFLFPPKPKDTLMISRTPEVTCVVVDVSHEDPEVKFNWYVDGVEVHNAKTKPREEGYNSTYRVVSVLTVLHQDWLNGKEYKCKVSNKALPAPIEKTISKAKGQPREPQVYTLPPSRDELTKNQVSLTCLVKGFYPSDIAVEWESNGQPENNYKTTPPVLDSDGSFFLYSKLTVDKSRWQQGNVFSCSVMHEALHNHYTQKSLSLSPGK

SEQ ID NO: 1009 - protein, 248 aa, Artificial
  Synthetic
CNVNHKPSNTKVDKKVEPKSCDKTHTCPPCPAPELLGGPSVFLFPPKPKDTLMISRTPEVTCVVVDVSHEDPEVKFNWYVDGVEVHNAKTKPREEQKNSTYRVVSVLTVLHQDWLNGKEYKCKVSNKALPAPIEKTISKAKGQPREPQVYTLPPSRDELTKNQVSLTCLVKGFYPSDIAVEWESNGQPENNYKTTPPVLDSDGSFFLYSKLTVDKSRWQQGNVFSCSVMHEALHNHYTQKSLSLSPGK

SEQ ID NO: 1010 - protein, 248 aa, Artificial
  Synthetic
CNVNHKPSNTKVDKKVEPKSCDKTHTCPPCPAPELLGGPSVFLFPPKPKDTLMISRTPEVTCVVVDVSHEDPEVKFNWYVDGVEVHNAKTKPREEQRNSTYRVVSVLTVLHQDWLNGKEYKCKVSNKALPAPIEKTISKAKGQPREPQVYTLPPSRDELTKNQVSLTCLVKGFYPSDIAVEWESNGQPENNYKTTPPVLDSDGSFFLYSKLTVDKSRWQQGNVFSCSVMHEALHNHYTQKSLSLSPGK

SEQ ID NO: 1011 - protein, 248 aa, Artificial
  Synthetic
CNVNHKPSNTKVDKKVEPKSCDKTHTCPPCPAPELLGGPSVFLFPPKPKDTLMISRTPEVTCVVVDVSHEDPEVKFNWYVDGVEVHNAKTKPREEQANSTYRVVSVLTVLHQDWLNGKEYKCKVSNKALPAPIEKTISKAKGQPREPQVYTLPPSRDELTKNQVSLTCLVKGFYPSDIAVEWESNGQPENNYKTTPPVLDSDGSFFLYSKLTVDKSRWQQGNVFSCSVMHEALHNHYTQKSLSLSPGK

SEQ ID NO: 1012 - protein, 248 aa, Artificial
  Synthetic
CNVNHKPSNTKVDKKVEPKSCDKTHTCPPCPAPELLGGPSVFLFPPKPKDTLMISRTPEVTCVVVDVSHEDPEVKFNWYVDGVEVHNAKTKPREEQVNSTYRVVSVLTVLHQDWLNGKEYKCKVSNKALPAPIEKTISKAKGQPREPQVYTLPPSRDELTKNQVSLTCLVKGFYPSDIAVEWESNGQPENNYKTTPPVLDSDGSFFLYSKLTVDKSRWQQGNVFSCSVMHEALHNHYTQKSLSLSPGK

SEQ ID NO: 1013 - protein, 248 aa, Artificial
  Synthetic
CNVNHKPSNTKVDKKVEPKSCDKTHTCPPCPAPELLGGPSVFLFPPKPKDTLMISRTPEVTCVVVDVSHEDPEVKFNWYVDGVEVHNAKTKPREEQMNSTYRVVSVLTVLHQDWLNGKEYKCKVSNKALPAPIEKTISKAKGQPREPQVYTLPPSRDELTKNQVSLTCLVKGFYPSDIAVEWESNGQPENNYKTTPPVLDSDGSFFLYSKLTVDKSRWQQGNVFSCSVMHEALHNHYTQKSLSLSPGK

SEQ ID NO: 1014 - protein, 248 aa, Artificial
  Synthetic
CNVNHKPSNTKVDKKVEPKSCDKTHTCPPCPAPELLGGPSVFLFPPKPKDTLMISRTPEVTCVVVDVSHEDPEVKFNWYVDGVEVHNAKTKPREEQGNSTYRVVSVLTVLHQDWLNGKEYKCKVSNKALPAPIEKTISKAKGQPREPQVYTLPPSRDELTKNQVSLTCLVKGFYPSDIAVEWESNGQPENNYKTTPPVLDSDGSFFLYSKLTVDKSRWQQGNVFSCSVMHEALHNHYTQKSLSLSPGK

SEQ ID NO: 1015 - protein, 248 aa, Artificial
  Synthetic
CNVNHKPSNTKVDKKVEPKSCDKTHTCPPCPAPELLGGPSVFLFPPKPKDTLMISRTPEVTCVVVDVSHEDPEVKFNWYVDGVEVHNAKTKPREEQYNSTYRVVSVLTVLHQDWLNGKEYKCKVHNKALPAPIEKTISKAKGQPREPQVYTLPPSRDELTKNQVSLTCLVKGFYPSDIAVEWESNGQPENNYKTTPPVLDSDGSFFLYSKLTVDKSRWQQGNVFSCSVMHEALHNHYTQKSLSLSPGK

SEQ ID NO: 1016 - protein, 248 aa, Artificial
  Synthetic
CNVNHKPSNTKVDKKVEPKSCDKTHTCPPCPAPELLGGPSVFLFPPKPKDTLMISRTPEVTCVVVDVSHEDPEVKFNWYVDGVEVHNAKTKPREEQYNSTYRVVSVLTVLHQDWLNGKEYKCKVFNKALPAPIEKTISKAKGQPREPQVYTLPPSRDELTKNQVSLTCLVKGFYPSDIAVEWESNGQPENNYKTTPPVLDSDGSFFLYSKLTVDKSRWQQGNVFSCSVMHEALHNHYTQKSLSLSPGK

SEQ ID NO: 1017 - protein, 248 aa, Artificial
  Synthetic
CNVNHKPSNTKVDKKVEPKSCDKTHTCPPCPAPELLGGPSVFLFPPKPKDTLMISRTPEVTCVVVDVSHEDPEVKFNWYVDGVEVHNAKTKPREEQYNSTYRVVSVLTVLHQDWLNGKEYKCKVMNKALPAPIEKTISKAKGQPREPQVYTLPPSRDELTKNQVSLTCLVKGFYPSDIAVEWESNGQPENNYKTTPPVLDSDGSFFLYSKLTVDKSRWQQGNVFSCSVMHEALHNHYTQKSLSLSPGK

SEQ ID NO: 1018 - protein, 248 aa, Artificial
  Synthetic
CNVNHKPSNTKVDKKVEPKSCDKTHTCPPCPAPELLGGPSVFLFPPKPKDTLMISRTPEVTCVVVDVSHEDPEVKFNWYVDGVEVHNAKTKPREEQYNSTYRVVSVLTVLHQDWLNGKEYKCKVWNKALPAPIEKTISKAKGQPREPQVYTLPPSRDELTKNQVSLTCLVKGFYPSDIAVEWESNGQPENNYKTTPPVLDSDGSFFLYSKLTVDKSRWQQGNVFSCSVMHEALHNHYTQKSLSLSPGK

SEQ ID NO: 1019 - protein, 248 aa, Artificial
  Synthetic
CNVNHKPSNTKVDKKVEPKSCDKTHTCPPCPAPELLGGPSVFLFPPKPKDTLMISRTPEVTCVVVDVSHEDPEVKFNWYVDGVEVHNAKTKPREEQYNSTYRVVSVLTVLHQDWLNGKEYKCKVPNKALPAPIEKTISKAKGQPREPQVYTLPPSRDELTKNQVSLTCLVKGFYPSDIAVEWESNGQPENNYKTTPPVLDSDGSFFLYSKLTVDKSRWQQGNVFSCSVMHEALHNHYTQKSLSLSPGK

SEQ ID NO: 1020 - protein, 248 aa, Artificial
  Synthetic
CNVNHKPSNTKVDKKVEPKSCDKTHTCPPCPAPELLGGPSVFLFPPKPKDTLMISRTPEVTCVVVDVSHEDPEVKFNWYVDGVEVHNAKTKPREEQYNSTYRVVSVLTVLHQDWLNGKEYKCKVGNKALPAPIEKTISKAKGQPREPQVYTLPPSRDELTKNQVSLTCLVKGFYPSDIAVEWESNGQPENNYKTTPPVLDSDGSFFLYSKLTVDKSRWQQGNVFSCSVMHEALHNHYTQKSLSLSPGK

SEQ ID NO: 1021 - protein, 248 aa, Artificial
  Synthetic
CNVNHKPSNTKVDKKVEPKSCDKTHTCPPCEAPELLGGPSVFLFPPKPKDTLMISRTPEVTCVVVDVSHEDPEVKFNWYVDGVEVHNAKTKPREEQYNSTYRVVSVLTVLHQDWLNGKEYKCKVSNKALPAPIEKTISKAKGQPREPQVYTLPPSRDELTKNQVSLTCLVKGFYPSDIAVEWESNGQPENNYKTTPPVLDSDGSFFLYSKLTVDKSRWQQGNVFSCSVMHEALHNHYTQKSLSLSPGK

SEQ ID NO: 1022 - protein, 248 aa, Artificial
  Synthetic
CNVNHKPSNTKVDKKVEPKSCDKTHTCPPCYAPELLGGPSVFLFPPKPKDTLMISRTPEVTCVVVDVSHEDPEVKFNWYVDGVEVHNAKTKPREEQYNSTYRVVSVLTVLHQDWLNGKEYKCKVSNKALPAPIEKTISKAKGQPREPQVYTLPPSRDELTKNQVSLTCLVKGFYPSDIAVEWESNGQPENNYKTTPPVLDSDGSFFLYSKLTVDKSRWQQGNVFSCSVMHEALHNHYTQKSLSLSPGK

SEQ ID NO: 1023 - protein, 248 aa, Artificial
  Synthetic
CNVNHKPSNTKVDKKVEPKSCDKTHTCPPCGAPELLGGPSVFLFPPKPKDTLMISRTPEVTCVVVDVSHEDPEVKFNWYVDGVEVHNAKTKPREEQYNSTYRVVSVLTVLHQDWLNGKEYKCKVSNKALPAPIEKTISKAKGQPREPQVYTLPPSRDELTKNQVSLTCLVKGFYPSDIAVEWESNGQPENNYKTTPPVLDSDGSFFLYSKLTVDKSRWQQGNVFSCSVMHEALHNHYTQKSLSLSPGK

SEQ ID NO: 1024 - protein, 248 aa, Artificial
  Synthetic
CNVNHKPSNTKVDKKVEPKSCDKTHTCPPCPEPELLGGPSVFLFPPKPKDTLMISRTPEVTCVVVDVSHEDPEVKFNWYVDGVEVHNAKTKPREEQYNSTYRVVSVLTVLHQDWLNGKEYKCKVSNKALPAPIEKTISKAKGQPREPQVYTLPPSRDELTKNQVSLTCLVKGFYPSDIAVEWESNGQPENNYKTTPPVLDSDGSFFLYSKLTVDKSRWQQGNVFSCSVMHEALHNHYTQKSLSLSPGK

SEQ ID NO: 1025 - protein, 248 aa, Artificial
  Synthetic
CNVNHKPSNTKVDKKVEPKSCDKTHTCPPCPKPELLGGPSVFLFPPKPKDTLMISRTPEVTCVVVDVSHEDPEVKFNWYVDGVEVHNAKTKPREEQYNSTYRVVSVLTVLHQDWLNGKEYKCKVSNKALPAPIEKTISKAKGQPREPQVYTLPPSRDELTKNQVSLTCLVKGFYPSDIAVEWESNGQPENNYKTTPPVLDSDGSFFLYSKLTVDKSRWQQGNVFSCSVMHEALHNHYTQKSLSLSPGK

SEQ ID NO: 1026 - protein, 248 aa, Artificial
  Synthetic
CNVNHKPSNTKVDKKVEPKSCDKTHTCPPCPYPELLGGPSVFLFPPKPKDTLMISRTPEVTCVVVDVSHEDPEVKFNWYVDGVEVHNAKTKPREEQYNSTYRVVSVLTVLHQDWLNGKEYKCKVSNKALPAPIEKTISKAKGQPREPQVYTLPPSRDELTKNQVSLTCLVKGFYPSDIAVEWESNGQPENNYKTTPPVLDSDGSFFLYSKLTVDKSRWQQGNVFSCSVMHEALHNHYTQKSLSLSPGK

SEQ ID NO: 1027 - protein, 248 aa, Artificial
  Synthetic
CNVNHKPSNTKVDKKVEPKSCDKTHTCPPCPPPELLGGPSVFLFPPKPKDTLMISRTPEVTCVVVDVSHEDPEVKFNWYVDGVEVHNAKTKPREEQYNSTYRVVSVLTVLHQDWLNGKEYKCKVSNKALPAPIEKTISKAKGQPREPQVYTLPPSRDELTKNQVSLTCLVKGFYPSDIAVEWESNGQPENNYKTTPPVLDSDGSFFLYSKLTVDKSRWQQGNVFSCSVMHEALHNHYTQKSLSLSPGK

SEQ ID NO: 1028 - protein, 248 aa, Artificial
  Synthetic
CNVNHKPSNTKVDKKVEPKSCDKTHTCPPCPGPELLGGPSVFLFPPKPKDTLMISRTPEVTCVVVDVSHEDPEVKFNWYVDGVEVHNAKTKPREEQYNSTYRVVSVLTVLHQDWLNGKEYKCKVSNKALPAPIEKTISKAKGQPREPQVYTLPPSRDELTKNQVSLTCLVKGFYPSDIAVEWESNGQPENNYKTTPPVLDSDGSFFLYSKLTVDKSRWQQGNVFSCSVMHEALHNHYTQKSLSLSPGK

SEQ ID NO: 1029 - protein, 248 aa, Artificial
  Synthetic
CNVNHKPSNTKVDKKVEPKSCDKTHTCPPCPAPNLLGGPSVFLFPPKPKDTLMISRTPEVTCVVVDVSHEDPEVKFNWYVDGVEVHNAKTKPREEQYNSTYRVVSVLTVLHQDWLNGKEYKCKVSNKALPAPIEKTISKAKGQPREPQVYTLPPSRDELTKNQVSLTCLVKGFYPSDIAVEWESNGQPENNYKTTPPVLDSDGSFFLYSKLTVDKSRWQQGNVFSCSVMHEALHNHYTQKSLSLSPGK

SEQ ID NO: 1030 - protein, 248 aa, Artificial
  Synthetic
CNVNHKPSNTKVDKKVEPKSCDKTHTCPPCPAPQLLGGPSVFLFPPKPKDTLMISRTPEVTCVVVDVSHEDPEVKFNWYVDGVEVHNAKTKPREEQYNSTYRVVSVLTVLHQDWLNGKEYKCKVSNKALPAPIEKTISKAKGQPREPQVYTLPPSRDELTKNQVSLTCLVKGFYPSDIAVEWESNGQPENNYKTTPPVLDSDGSFFLYSKLTVDKSRWQQGNVFSCSVMHEALHNHYTQKSLSLSPGK

SEQ ID NO: 1031 - protein, 248 aa, Artificial
  Synthetic
CNVNHKPSNTKVDKKVEPKSCDKTHTCPPCPAPKLLGGPSVFLFPPKPKDTLMISRTPEVTCVVVDVSHEDPEVKFNWYVDGVEVHNAKTKPREEQYNSTYRVVSVLTVLHQDWLNGKEYKCKVSNKALPAPIEKTISKAKGQPREPQVYTLPPSRDELTKNQVSLTCLVKGFYPSDIAVEWESNGQPENNYKTTPPVLDSDGSFFLYSKLTVDKSRWQQGNVFSCSVMHEALHNHYTQKSLSLSPGK

SEQ ID NO: 1032 - protein, 248 aa, Artificial
  Synthetic
CNVNHKPSNTKVDKKVEPKSCDKTHTCPPCPAPRLLGGPSVFLFPPKPKDTLMISRTPEVTCVVVDVSHEDPEVKFNWYVDGVEVHNAKTKPREEQYNSTYRVVSVLTVLHQDWLNGKEYKCKVSNKALPAPIEKTISKAKGQPREPQVYTLPPSRDELTKNQVSLTCLVKGFYPSDIAVEWESNGQPENNYKTTPPVLDSDGSFFLYSKLTVDKSRWQQGNVFSCSVMHEALHNHYTQKSLSLSPGK

SEQ ID NO: 1033 - protein, 248 aa, Artificial
  Synthetic
CNVNHKPSNTKVDKKVEPKSCDKTHTCPPCPAPSLLGGPSVFLFPPKPKDTLMISRTPEVTCVVVDVSHEDPEVKFNWYVDGVEVHNAKTKPREEQYNSTYRVVSVLTVLHQDWLNGKEYKCKVSNKALPAPIEKTISKAKGQPREPQVYTLPPSRDELTKNQVSLTCLVKGFYPSDIAVEWESNGQPENNYKTTPPVLDSDGSFFLYSKLTVDKSRWQQGNVFSCSVMHEALHNHYTQKSLSLSPGK

SEQ ID NO: 1034 - protein, 248 aa, Artificial
  Synthetic
CNVNHKPSNTKVDKKVEPKSCDKTHTCPPCPAPTLLGGPSVFLFPPKPKDTLMISRTPEVTCVVVDVSHEDPEVKFNWYVDGVEVHNAKTKPREEQYNSTYRVVSVLTVLHQDWLNGKEYKCKVSNKALPAPIEKTISKAKGQPREPQVYTLPPSRDELTKNQVSLTCLVKGFYPSDIAVEWESNGQPENNYKTTPPVLDSDGSFFLYSKLTVDKSRWQQGNVFSCSVMHEALHNHYTQKSLSLSPGK

SEQ ID NO: 1035 - protein, 248 aa, Artificial
  Synthetic
CNVNHKPSNTKVDKKVEPKSCDKTHTCPPCPAPHLLGGPSVFLFPPKPKDTLMISRTPEVTCVVVDVSHEDPEVKFNWYVDGVEVHNAKTKPREEQYNSTYRVVSVLTVLHQDWLNGKEYKCKVSNKALPAPIEKTISKAKGQPREPQVYTLPPSRDELTKNQVSLTCLVKGFYPSDIAVEWESNGQPENNYKTTPPVLDSDGSFFLYSKLTVDKSRWQQGNVFSCSVMHEALHNHYTQKSLSLSPGK

SEQ ID NO: 1036 - protein, 248 aa, Artificial
  Synthetic
CNVNHKPSNTKVDKKVEPKSCDKTHTCPPCPAPALLGGPSVFLFPPKPKDTLMISRTPEVTCVVVDVSHEDPEVKFNWYVDGVEVHNAKTKPREEQYNSTYRVVSVLTVLHQDWLNGKEYKCKVSNKALPAPIEKTISKAKGQPREPQVYTLPPSRDELTKNQVSLTCLVKGFYPSDIAVEWESNGQPENNYKTTPPVLDSDGSFFLYSKLTVDKSRWQQGNVFSCSVMHEALHNHYTQKSLSLSPGK

SEQ ID NO: 1037 - protein, 248 aa, Artificial
  Synthetic
CNVNHKPSNTKVDKKVEPKSCDKTHTCPPCPAPVLLGGPSVFLFPPKPKDTLMISRTPEVTCVVVDVSHEDPEVKFNWYVDGVEVHNAKTKPREEQYNSTYRVVSVLTVLHQDWLNGKEYKCKVSNKALPAPIEKTISKAKGQPREPQVYTLPPSRDELTKNQVSLTCLVKGFYPSDIAVEWESNGQPENNYKTTPPVLDSDGSFFLYSKLTVDKSRWQQGNVFSCSVMHEALHNHYTQKSLSLSPGK

SEQ ID NO: 1038 - protein, 248 aa, Artificial
  Synthetic
CNVNHKPSNTKVDKKVEPKSCDKTHTCPPCPAPLLLGGPSVFLFPPKPKDTLMISRTPEVTCVVVDVSHEDPEVKFNWYVDGVEVHNAKTKPREEQYNSTYRVVSVLTVLHQDWLNGKEYKCKVSNKALPAPIEKTISKAKGQPREPQVYTLPPSRDELTKNQVSLTCLVKGFYPSDIAVEWESNGQPENNYKTTPPVLDSDGSFFLYSKLTVDKSRWQQGNVFSCSVMHEALHNHYTQKSLSLSPGK

SEQ ID NO: 1039 - protein, 248 aa, Artificial
  Synthetic
CNVNHKPSNTKVDKKVEPKSCDKTHTCPPCPAPILLGGPSVFLFPPKPKDTLMISRTPEVTCVVVDVSHEDPEVKFNWYVDGVEVHNAKTKPREEQYNSTYRVVSVLTVLHQDWLNGKEYKCKVSNKALPAPIEKTISKAKGQPREPQVYTLPPSRDELTKNQVSLTCLVKGFYPSDIAVEWESNGQPENNYKTTPPVLDSDGSFFLYSKLTVDKSRWQQGNVFSCSVMHEALHNHYTQKSLSLSPGK

SEQ ID NO: 1040 - protein, 248 aa, Artificial
  Synthetic
CNVNHKPSNTKVDKKVEPKSCDKTHTCPPCPAPFLLGGPSVFLFPPKPKDTLMISRTPEVTCVVVDVSHEDPEVKFNWYVDGVEVHNAKTKPREEQYNSTYRVVSVLTVLHQDWLNGKEYKCKVSNKALPAPIEKTISKAKGQPREPQVYTLPPSRDELTKNQVSLTCLVKGFYPSDIAVEWESNGQPENNYKTTPPVLDSDGSFFLYSKLTVDKSRWQQGNVFSCSVMHEALHNHYTQKSLSLSPGK

SEQ ID NO: 1041 - protein, 248 aa, Artificial
  Synthetic
CNVNHKPSNTKVDKKVEPKSCDKTHTCPPCPAPMLLGGPSVFLFPPKPKDTLMISRTPEVTCVVVDVSHEDPEVKFNWYVDGVEVHNAKTKPREEQYNSTYRVVSVLTVLHQDWLNGKEYKCKVSNKALPAPIEKTISKAKGQPREPQVYTLPPSRDELTKNQVSLTCLVKGFYPSDIAVEWESNGQPENNYKTTPPVLDSDGSFFLYSKLTVDKSRWQQGNVFSCSVMHEALHNHYTQKSLSLSPGK

SEQ ID NO: 1042 - protein, 248 aa, Artificial
  Synthetic
CNVNHKPSNTKVDKKVEPKSCDKTHTCPPCPAPYLLGGPSVFLFPPKPKDTLMISRTPEVTCVVVDVSHEDPEVKFNWYVDGVEVHNAKTKPREEQYNSTYRVVSVLTVLHQDWLNGKEYKCKVSNKALPAPIEKTISKAKGQPREPQVYTLPPSRDELTKNQVSLTCLVKGFYPSDIAVEWESNGQPENNYKTTPPVLDSDGSFFLYSKLTVDKSRWQQGNVFSCSVMHEALHNHYTQKSLSLSPGK

SEQ ID NO: 1043 - protein, 248 aa, Artificial
  Synthetic
CNVNHKPSNTKVDKKVEPKSCDKTHTCPPCPAPWLLGGPSVFLFPPKPKDTLMISRTPEVTCVVVDVSHEDPEVKFNWYVDGVEVHNAKTKPREEQYNSTYRVVSVLTVLHQDWLNGKEYKCKVSNKALPAPIEKTISKAKGQPREPQVYTLPPSRDELTKNQVSLTCLVKGFYPSDIAVEWESNGQPENNYKTTPPVLDSDGSFFLYSKLTVDKSRWQQGNVFSCSVMHEALHNHYTQKSLSLSPGK

SEQ ID NO: 1044 - protein, 248 aa, Artificial
  Synthetic
CNVNHKPSNTKVDKKVEPKSCDKTHTCPPCPAPGLLGGPSVFLFPPKPKDTLMISRTPEVTCVVVDVSHEDPEVKFNWYVDGVEVHNAKTKPREEQYNSTYRVVSVLTVLHQDWLNGKEYKCKVSNKALPAPIEKTISKAKGQPREPQVYTLPPSRDELTKNQVSLTCLVKGFYPSDIAVEWESNGQPENNYKTTPPVLDSDGSFFLYSKLTVDKSRWQQGNVFSCSVMHEALHNHYTQKSLSLSPGK

SEQ ID NO: 1045 - protein, 248 aa, Artificial
  Synthetic
CNVNHKPSNTKVDKKVEPKSCDKTHTCPPCPAPELLGGPSVFLFPPKPKDTLMISRTPEVTCVVVDVSHEDPDVKFNWYVDGVEVHNAKTKPREEQYNSTYRVVSVLTVLHQDWLNGKEYKCKVSNKALPAPIEKTISKAKGQPREPQVYTLPPSRDELTKNQVSLTCLVKGFYPSDIAVEWESNGQPENNYKTTPPVLDSDGSFFLYSKLTVDKSRWQQGNVFSCSVMHEALHNHYTQKSLSLSPGK

SEQ ID NO: 1046 - protein, 248 aa, Artificial
  Synthetic
CNVNHKPSNTKVDKKVEPKSCDKTHTCPPCPAPELLGGPSVFLFPPKPKDTLMISRTPEVTCVVVDVSHEDPRVKFNWYVDGVEVHNAKTKPREEQYNSTYRVVSVLTVLHQDWLNGKEYKCKVSNKALPAPIEKTISKAKGQPREPQVYTLPPSRDELTKNQVSLTCLVKGFYPSDIAVEWESNGQPENNYKTTPPVLDSDGSFFLYSKLTVDKSRWQQGNVFSCSVMHEALHNHYTQKSLSLSPGK

SEQ ID NO: 1047 - protein, 248 aa, Artificial
  Synthetic
CNVNHKPSNTKVDKKVEPKSCDKTHTCPPCPAPELLGGPSVFLFPPKPKDTLMISRTPEVTCVVVDVSHEDPTVKFNWYVDGVEVHNAKTKPREEQYNSTYRVVSVLTVLHQDWLNGKEYKCKVSNKALPAPIEKTISKAKGQPREPQVYTLPPSRDELTKNQVSLTCLVKGFYPSDIAVEWESNGQPENNYKTTPPVLDSDGSFFLYSKLTVDKSRWQQGNVFSCSVMHEALHNHYTQKSLSLSPGK

SEQ ID NO: 1048 - protein, 248 aa, Artificial
  Synthetic
CNVNHKPSNTKVDKKVEPKSCDKTHTCPPCPAPELLGGPSVFLFPPKPKDTLMISRTPEVTCVVVDVSHEDPHVKFNWYVDGVEVHNAKTKPREEQYNSTYRVVSVLTVLHQDWLNGKEYKCKVSNKALPAPIEKTISKAKGQPREPQVYTLPPSRDELTKNQVSLTCLVKGFYPSDIAVEWESNGQPENNYKTTPPVLDSDGSFFLYSKLTVDKSRWQQGNVFSCSVMHEALHNHYTQKSLSLSPGK

SEQ ID NO: 1049 - protein, 248 aa, Artificial
  Synthetic
CNVNHKPSNTKVDKKVEPKSCDKTHTCPPCPAPELLGGPSVFLFPPKPKDTLMISRTPEVTCVVVDVSHEDPVVKFNWYVDGVEVHNAKTKPREEQYNSTYRVVSVLTVLHQDWLNGKEYKCKVSNKALPAPIEKTISKAKGQPREPQVYTLPPSRDELTKNQVSLTCLVKGFYPSDIAVEWESNGQPENNYKTTPPVLDSDGSFFLYSKLTVDKSRWQQGNVFSCSVMHEALHNHYTQKSLSLSPGK

SEQ ID NO: 1050 - protein, 248 aa, Artificial
  Synthetic
CNVNHKPSNTKVDKKVEPKSCDKTHTCPPCPAPELLGGPSVFLFPPKPKDTLMISRTPEVTCVVVDVSHEDPLVKFNWYVDGVEVHNAKTKPREEQYNSTYRVVSVLTVLHQDWLNGKEYKCKVSNKALPAPIEKTISKAKGQPREPQVYTLPPSRDELTKNQVSLTCLVKGFYPSDIAVEWESNGQPENNYKTTPPVLDSDGSFFLYSKLTVDKSRWQQGNVFSCSVMHEALHNHYTQKSLSLSPGK

SEQ ID NO: 1051 - protein, 248 aa, Artificial
  Synthetic
CNVNHKPSNTKVDKKVEPKSCDKTHTCPPCPAPELLGGPSVFLFPPKPKDTLMISRTPEVTCVVVDVSHEDPFVKFNWYVDGVEVHNAKTKPREEQYNSTYRVVSVLTVLHQDWLNGKEYKCKVSNKALPAPIEKTISKAKGQPREPQVYTLPPSRDELTKNQVSLTCLVKGFYPSDIAVEWESNGQPENNYKTTPPVLDSDGSFFLYSKLTVDKSRWQQGNVFSCSVMHEALHNHYTQKSLSLSPGK

SEQ ID NO: 1052 - protein, 248 aa, Artificial
  Synthetic
CNVNHKPSNTKVDKKVEPKSCDKTHTCPPCPAPELLGGPSVFLFPPKPKDTLMISRTPEVTCVVVDVSHEDPMVKFNWYVDGVEVHNAKTKPREEQYNSTYRVVSVLTVLHQDWLNGKEYKCKVSNKALPAPIEKTISKAKGQPREPQVYTLPPSRDELTKNQVSLTCLVKGFYPSDIAVEWESNGQPENNYKTTPPVLDSDGSFFLYSKLTVDKSRWQQGNVFSCSVMHEALHNHYTQKSLSLSPGK

SEQ ID NO: 1053 - protein, 248 aa, Artificial
  Synthetic
CNVNHKPSNTKVDKKVEPKSCDKTHTCPPCPAPELLGGPSVFLFPPKPKDTLMISRTPEVTCVVVDVSHEDPWVKFNWYVDGVEVHNAKTKPREEQYNSTYRVVSVLTVLHQDWLNGKEYKCKVSNKALPAPIEKTISKAKGQPREPQVYTLPPSRDELTKNQVSLTCLVKGFYPSDIAVEWESNGQPENNYKTTPPVLDSDGSFFLYSKLTVDKSRWQQGNVFSCSVMHEALHNHYTQKSLSLSPGK

SEQ ID NO: 1054 - protein, 248 aa, Artificial
  Synthetic
CNVNHKPSNTKVDKKVEPKSCDKTHTCPPCPAPELLGGPSVFLFPPKPKDTLMISRTPEVTCVVVDVSHEDPPVKFNWYVDGVEVHNAKTKPREEQYNSTYRVVSVLTVLHQDWLNGKEYKCKVSNKALPAPIEKTISKAKGQPREPQVYTLPPSRDELTKNQVSLTCLVKGFYPSDIAVEWESNGQPENNYKTTPPVLDSDGSFFLYSKLTVDKSRWQQGNVFSCSVMHEALHNHYTQKSLSLSPGK

SEQ ID NO: 1055 - protein, 248 aa, Artificial
  Synthetic
CNVNHKPSNTKVDKKVEPKSCDKTHTCPPCPAPELLGGPSVFLFPPKPKDTLMISRTPEVTCVVVDVSHEDPGVKFNWYVDGVEVHNAKTKPREEQYNSTYRVVSVLTVLHQDWLNGKEYKCKVSNKALPAPIEKTISKAKGQPREPQVYTLPPSRDELTKNQVSLTCLVKGFYPSDIAVEWESNGQPENNYKTTPPVLDSDGSFFLYSKLTVDKSRWQQGNVFSCSVMHEALHNHYTQKSLSLSPGK

SEQ ID NO: 1056 - protein, 248 aa, Artificial
  Synthetic
CNVNHKPSNTKVDKKVEPKSCDKTHTCPPCPAPELLGGPSVFLFPPKPKDTLMISRTPEVTCVVVDVSHEDPEVDFNWYVDGVEVHNAKTKPREEQYNSTYRVVSVLTVLHQDWLNGKEYKCKVSNKALPAPIEKTISKAKGQPREPQVYTLPPSRDELTKNQVSLTCLVKGFYPSDIAVEWESNGQPENNYKTTPPVLDSDGSFFLYSKLTVDKSRWQQGNVFSCSVMHEALHNHYTQKSLSLSPGK

SEQ ID NO: 1057 - protein, 248 aa, Artificial
  Synthetic
CNVNHKPSNTKVDKKVEPKSCDKTHTCPPCPAPELLGGPSVFLFPPKPKDTLMISRTPEVTCVVVDVSHEDPEVNFNWYVDGVEVHNAKTKPREEQYNSTYRVVSVLTVLHQDWLNGKEYKCKVSNKALPAPIEKTISKAKGQPREPQVYTLPPSRDELTKNQVSLTCLVKGFYPSDIAVEWESNGQPENNYKTTPPVLDSDGSFFLYSKLTVDKSRWQQGNVFSCSVMHEALHNHYTQKSLSLSPGK

SEQ ID NO: 1058 - protein, 248 aa, Artificial
  Synthetic
CNVNHKPSNTKVDKKVEPKSCDKTHTCPPCPAPELLGGPSVFLFPPKPKDTLMISRTPEVTCVVVDVSHEDPEVSFNWYVDGVEVHNAKTKPREEQYNSTYRVVSVLTVLHQDWLNGKEYKCKVSNKALPAPIEKTISKAKGQPREPQVYTLPPSRDELTKNQVSLTCLVKGFYPSDIAVEWESNGQPENNYKTTPPVLDSDGSFFLYSKLTVDKSRWQQGNVFSCSVMHEALHNHYTQKSLSLSPGK

SEQ ID NO: 1059 - protein, 248 aa, Artificial
  Synthetic
CNVNHKPSNTKVDKKVEPKSCDKTHTCPPCPAPELLGGPSVFLFPPKPKDTLMISRTPEVTCVVVDVSHEDPEVHFNWYVDGVEVHNAKTKPREEQYNSTYRVVSVLTVLHQDWLNGKEYKCKVSNKALPAPIEKTISKAKGQPREPQVYTLPPSRDELTKNQVSLTCLVKGFYPSDIAVEWESNGQPENNYKTTPPVLDSDGSFFLYSKLTVDKSRWQQGNVFSCSVMHEALHNHYTQKSLSLSPGK

SEQ ID NO: 1060 - protein, 248 aa, Artificial
  Synthetic
CNVNHKPSNTKVDKKVEPKSCDKTHTCPPCPAPELLGGPSVFLFPPKPKDTLMISRTPEVTCVVVDVSHEDPEVVFNWYVDGVEVHNAKTKPREEQYNSTYRVVSVLTVLHQDWLNGKEYKCKVSNKALPAPIEKTISKAKGQPREPQVYTLPPSRDELTKNQVSLTCLVKGFYPSDIAVEWESNGQPENNYKTTPPVLDSDGSFFLYSKLTVDKSRWQQGNVFSCSVMHEALHNHYTQKSLSLSPGK

SEQ ID NO: 1061 - protein, 248 aa, Artificial
  Synthetic
CNVNHKPSNTKVDKKVEPKSCDKTHTCPPCPAPELLGGPSVFLFPPKPKDTLMISRTPEVTCVVVDVSHEDPEVIFNWYVDGVEVHNAKTKPREEQYNSTYRVVSVLTVLHQDWLNGKEYKCKVSNKALPAPIEKTISKAKGQPREPQVYTLPPSRDELTKNQVSLTCLVKGFYPSDIAVEWESNGQPENNYKTTPPVLDSDGSFFLYSKLTVDKSRWQQGNVFSCSVMHEALHNHYTQKSLSLSPGK

SEQ ID NO: 1062 - protein, 248 aa, Artificial
  Synthetic
CNVNHKPSNTKVDKKVEPKSCDKTHTCPPCPAPELLGGPSVFLFPPKPKDTLMISRTPEVTCVVVDVSHEDPEVFFNWYVDGVEVHNAKTKPREEQYNSTYRVVSVLTVLHQDWLNGKEYKCKVSNKALPAPIEKTISKAKGQPREPQVYTLPPSRDELTKNQVSLTCLVKGFYPSDIAVEWESNGQPENNYKTTPPVLDSDGSFFLYSKLTVDKSRWQQGNVFSCSVMHEALHNHYTQKSLSLSPGK

SEQ ID NO: 1063 - protein, 248 aa, Artificial
  Synthetic
CNVNHKPSNTKVDKKVEPKSCDKTHTCPPCPAPELLGGPSVFLFPPKPKDTLMISRTPEVTCVVVDVSHEDPEVMFNWYVDGVEVHNAKTKPREEQYNSTYRVVSVLTVLHQDWLNGKEYKCKVSNKALPAPIEKTISKAKGQPREPQVYTLPPSRDELTKNQVSLTCLVKGFYPSDIAVEWESNGQPENNYKTTPPVLDSDGSFFLYSKLTVDKSRWQQGNVFSCSVMHEALHNHYTQKSLSLSPGK

SEQ ID NO: 1064 - protein, 248 aa, Artificial
  Synthetic
CNVNHKPSNTKVDKKVEPKSCDKTHTCPPCPAPELLGGPSVFLFPPKPKDTLMISRTPEVTCVVVDVSHEDPEVWFNWYVDGVEVHNAKTKPREEQYNSTYRVVSVLTVLHQDWLNGKEYKCKVSNKALPAPIEKTISKAKGQPREPQVYTLPPSRDELTKNQVSLTCLVKGFYPSDIAVEWESNGQPENNYKTTPPVLDSDGSFFLYSKLTVDKSRWQQGNVFSCSVMHEALHNHYTQKSLSLSPGK

SEQ ID NO: 1065 - protein, 248 aa, Artificial
  Synthetic
CNVNHKPSNTKVDKKVEPKSCDKTHTCPPCPAPELLGGPSVFLFPPKPKDTLMISRTPEVTCVVVDVSHEDPEVPFNWYVDGVEVHNAKTKPREEQYNSTYRVVSVLTVLHQDWLNGKEYKCKVSNKALPAPIEKTISKAKGQPREPQVYTLPPSRDELTKNQVSLTCLVKGFYPSDIAVEWESNGQPENNYKTTPPVLDSDGSFFLYSKLTVDKSRWQQGNVFSCSVMHEALHNHYTQKSLSLSPGK

SEQ ID NO: 1066 - protein, 248 aa, Artificial
  Synthetic
CNVNHKPSNTKVDKKVEPKSCDKTHTCPPCPAPELLGGPSVFLFPPKPKDTLMISRTPEVTCVVVDVSHEDPEVGFNWYVDGVEVHNAKTKPREEQYNSTYRVVSVLTVLHQDWLNGKEYKCKVSNKALPAPIEKTISKAKGQPREPQVYTLPPSRDELTKNQVSLTCLVKGFYPSDIAVEWESNGQPENNYKTTPPVLDSDGSFFLYSKLTVDKSRWQQGNVFSCSVMHEALHNHYTQKSLSLSPGK

SEQ ID NO: 1067 - protein, 248 aa, Artificial
  Synthetic
CNVNHKPSNTKVDKKVEPKSCDKTHTCPPCPAPELLGGPSVFLFPPKPKDTLMISRTPEVTCVVVDVSHEDPEVKFDWYVDGVEVHNAKTKPREEQYNSTYRVVSVLTVLHQDWLNGKEYKCKVSNKALPAPIEKTISKAKGQPREPQVYTLPPSRDELTKNQVSLTCLVKGFYPSDIAVEWESNGQPENNYKTTPPVLDSDGSFFLYSKLTVDKSRWQQGNVFSCSVMHEALHNHYTQKSLSLSPGK

SEQ ID NO: 1068 - protein, 248 aa, Artificial
  Synthetic
CNVNHKPSNTKVDKKVEPKSCDKTHTCPPCPAPELLGGPSVFLFPPKPKDTLMISRTPEVTCVVVDVSHEDPEVKFTWYVDGVEVHNAKTKPREEQYNSTYRVVSVLTVLHQDWLNGKEYKCKVSNKALPAPIEKTISKAKGQPREPQVYTLPPSRDELTKNQVSLTCLVKGFYPSDIAVEWESNGQPENNYKTTPPVLDSDGSFFLYSKLTVDKSRWQQGNVFSCSVMHEALHNHYTQKSLSLSPGK

SEQ ID NO: 1069 - protein, 248 aa, Artificial
  Synthetic
CNVNHKPSNTKVDKKVEPKSCDKTHTCPPCPAPELLGGPSVFLFPPKPKDTLMISRTPEVTCVVVDVSHEDPEVKFHWYVDGVEVHNAKTKPREEQYNSTYRVVSVLTVLHQDWLNGKEYKCKVSNKALPAPIEKTISKAKGQPREPQVYTLPPSRDELTKNQVSLTCLVKGFYPSDIAVEWESNGQPENNYKTTPPVLDSDGSFFLYSKLTVDKSRWQQGNVFSCSVMHEALHNHYTQKSLSLSPGK

SEQ ID NO: 1070 - protein, 248 aa, Artificial
  Synthetic
CNVNHKPSNTKVDKKVEPKSCDKTHTCPPCPAPELLGGPSVFLFPPKPKDTLMISRTPEVTCVVVDVSHEDPEVKFVWYVDGVEVHNAKTKPREEQYNSTYRVVSVLTVLHQDWLNGKEYKCKVSNKALPAPIEKTISKAKGQPREPQVYTLPPSRDELTKNQVSLTCLVKGFYPSDIAVEWESNGQPENNYKTTPPVLDSDGSFFLYSKLTVDKSRWQQGNVFSCSVMHEALHNHYTQKSLSLSPGK

SEQ ID NO: 1071 - protein, 248 aa, Artificial
  Synthetic
CNVNHKPSNTKVDKKVEPKSCDKTHTCPPCPAPELLGGPSVFLFPPKPKDTLMISRTPEVTCVVVDVSHEDPEVKFIWYVDGVEVHNAKTKPREEQYNSTYRVVSVLTVLHQDWLNGKEYKCKVSNKALPAPIEKTISKAKGQPREPQVYTLPPSRDELTKNQVSLTCLVKGFYPSDIAVEWESNGQPENNYKTTPPVLDSDGSFFLYSKLTVDKSRWQQGNVFSCSVMHEALHNHYTQKSLSLSPGK

SEQ ID NO: 1072 - protein, 248 aa, Artificial
  Synthetic
CNVNHKPSNTKVDKKVEPKSCDKTHTCPPCPAPELLGGPSVFLFPPKPKDTLMISRTPEVTCVVVDVSHEDPEVKFFWYVDGVEVHNAKTKPREEQYNSTYRVVSVLTVLHQDWLNGKEYKCKVSNKALPAPIEKTISKAKGQPREPQVYTLPPSRDELTKNQVSLTCLVKGFYPSDIAVEWESNGQPENNYKTTPPVLDSDGSFFLYSKLTVDKSRWQQGNVFSCSVMHEALHNHYTQKSLSLSPGK

SEQ ID NO: 1073 - protein, 248 aa, Artificial
  Synthetic
CNVNHKPSNTKVDKKVEPKSCDKTHTCPPCPAPELLGGPSVFLFPPKPKDTLMISRTPEVTCVVVDVSHEDPEVKFMWYVDGVEVHNAKTKPREEQYNSTYRVVSVLTVLHQDWLNGKEYKCKVSNKALPAPIEKTISKAKGQPREPQVYTLPPSRDELTKNQVSLTCLVKGFYPSDIAVEWESNGQPENNYKTTPPVLDSDGSFFLYSKLTVDKSRWQQGNVFSCSVMHEALHNHYTQKSLSLSPGK

SEQ ID NO: 1074 - protein, 248 aa, Artificial
  Synthetic
CNVNHKPSNTKVDKKVEPKSCDKTHTCPPCPAPELLGGPSVFLFPPKPKDTLMISRTPEVTCVVVDVSHEDPEVKFWWYVDGVEVHNAKTKPREEQYNSTYRVVSVLTVLHQDWLNGKEYKCKVSNKALPAPIEKTISKAKGQPREPQVYTLPPSRDELTKNQVSLTCLVKGFYPSDIAVEWESNGQPENNYKTTPPVLDSDGSFFLYSKLTVDKSRWQQGNVFSCSVMHEALHNHYTQKSLSLSPGK

SEQ ID NO: 1075 - protein, 248 aa, Artificial
  Synthetic
CNVNHKPSNTKVDKKVEPKSCDKTHTCPPCPAPELLGGPSVFLFPPKPKDTLMISRTPEVTCVVVDVSHEDPEVKFPWYVDGVEVHNAKTKPREEQYNSTYRVVSVLTVLHQDWLNGKEYKCKVSNKALPAPIEKTISKAKGQPREPQVYTLPPSRDELTKNQVSLTCLVKGFYPSDIAVEWESNGQPENNYKTTPPVLDSDGSFFLYSKLTVDKSRWQQGNVFSCSVMHEALHNHYTQKSLSLSPGK

SEQ ID NO: 1076 - protein, 248 aa, Artificial
  Synthetic
CNVNHKPSNTKVDKKVEPKSCDKTHTCPPCPAPELLGGPSVFLFPPKPKDTLMISRTPEVTCVVVDVSHEDPEVKFGWYVDGVEVHNAKTKPREEQYNSTYRVVSVLTVLHQDWLNGKEYKCKVSNKALPAPIEKTISKAKGQPREPQVYTLPPSRDELTKNQVSLTCLVKGFYPSDIAVEWESNGQPENNYKTTPPVLDSDGSFFLYSKLTVDKSRWQQGNVFSCSVMHEALHNHYTQKSLSLSPGK

SEQ ID NO: 1077 - protein, 248 aa, Artificial
  Synthetic
CNVNHKPSNTKVDKKVEPKSCDKTHTCPPCPAPELLGGPSVFLFPPKPKDTLMISRTPEVTCVVVDVSHEDPEVKFNWDVDGVEVHNAKTKPREEQYNSTYRVVSVLTVLHQDWLNGKEYKCKVSNKALPAPIEKTISKAKGQPREPQVYTLPPSRDELTKNQVSLTCLVKGFYPSDIAVEWESNGQPENNYKTTPPVLDSDGSFFLYSKLTVDKSRWQQGNVFSCSVMHEALHNHYTQKSLSLSPGK

SEQ ID NO: 1078 - protein, 248 aa, Artificial
  Synthetic
CNVNHKPSNTKVDKKVEPKSCDKTHTCPPCPAPELLGGPSVFLFPPKPKDTLMISRTPEVTCVVVDVSHEDPEVKFNWNVDGVEVHNAKTKPREEQYNSTYRVVSVLTVLHQDWLNGKEYKCKVSNKALPAPIEKTISKAKGQPREPQVYTLPPSRDELTKNQVSLTCLVKGFYPSDIAVEWESNGQPENNYKTTPPVLDSDGSFFLYSKLTVDKSRWQQGNVFSCSVMHEALHNHYTQKSLSLSPGK

SEQ ID NO: 1079 - protein, 248 aa, Artificial
  Synthetic
CNVNHKPSNTKVDKKVEPKSCDKTHTCPPCPAPELLGGPSVFLFPPKPKDTLMISRTPEVTCVVVDVSHEDPEVKFNWQVDGVEVHNAKTKPREEQYNSTYRVVSVLTVLHQDWLNGKEYKCKVSNKALPAPIEKTISKAKGQPREPQVYTLPPSRDELTKNQVSLTCLVKGFYPSDIAVEWESNGQPENNYKTTPPVLDSDGSFFLYSKLTVDKSRWQQGNVFSCSVMHEALHNHYTQKSLSLSPGK

SEQ ID NO: 1080 - protein, 248 aa, Artificial
  Synthetic
CNVNHKPSNTKVDKKVEPKSCDKTHTCPPCPAPELLGGPSVFLFPPKPKDTLMISRTPEVTCVVVDVSHEDPEVKFNWRVDGVEVHNAKTKPREEQYNSTYRVVSVLTVLHQDWLNGKEYKCKVSNKALPAPIEKTISKAKGQPREPQVYTLPPSRDELTKNQVSLTCLVKGFYPSDIAVEWESNGQPENNYKTTPPVLDSDGSFFLYSKLTVDKSRWQQGNVFSCSVMHEALHNHYTQKSLSLSPGK

SEQ ID NO: 1081 - protein, 248 aa, Artificial
  Synthetic
CNVNHKPSNTKVDKKVEPKSCDKTHTCPPCPAPELLGGPSVFLFPPKPKDTLMISRTPEVTCVVVDVSHEDPEVKFNWSVDGVEVHNAKTKPREEQYNSTYRVVSVLTVLHQDWLNGKEYKCKVSNKALPAPIEKTISKAKGQPREPQVYTLPPSRDELTKNQVSLTCLVKGFYPSDIAVEWESNGQPENNYKTTPPVLDSDGSFFLYSKLTVDKSRWQQGNVFSCSVMHEALHNHYTQKSLSLSPGK

SEQ ID NO: 1082 - protein, 248 aa, Artificial
  Synthetic
CNVNHKPSNTKVDKKVEPKSCDKTHTCPPCPAPELLGGPSVFLFPPKPKDTLMISRTPEVTCVVVDVSHEDPEVKFNWHVDGVEVHNAKTKPREEQYNSTYRVVSVLTVLHQDWLNGKEYKCKVSNKALPAPIEKTISKAKGQPREPQVYTLPPSRDELTKNQVSLTCLVKGFYPSDIAVEWESNGQPENNYKTTPPVLDSDGSFFLYSKLTVDKSRWQQGNVFSCSVMHEALHNHYTQKSLSLSPGK

SEQ ID NO: 1083 - protein, 248 aa, Artificial
  Synthetic
CNVNHKPSNTKVDKKVEPKSCDKTHTCPPCPAPELLGGPSVFLFPPKPKDTLMISRTPEVTCVVVDVSHEDPEVKFNWVVDGVEVHNAKTKPREEQYNSTYRVVSVLTVLHQDWLNGKEYKCKVSNKALPAPIEKTISKAKGQPREPQVYTLPPSRDELTKNQVSLTCLVKGFYPSDIAVEWESNGQPENNYKTTPPVLDSDGSFFLYSKLTVDKSRWQQGNVFSCSVMHEALHNHYTQKSLSLSPGK

SEQ ID NO: 1084 - protein, 248 aa, Artificial
  Synthetic
CNVNHKPSNTKVDKKVEPKSCDKTHTCPPCPAPELLGGPSVFLFPPKPKDTLMISRTPEVTCVVVDVSHEDPEVKFNWLVDGVEVHNAKTKPREEQYNSTYRVVSVLTVLHQDWLNGKEYKCKVSNKALPAPIEKTISKAKGQPREPQVYTLPPSRDELTKNQVSLTCLVKGFYPSDIAVEWESNGQPENNYKTTPPVLDSDGSFFLYSKLTVDKSRWQQGNVFSCSVMHEALHNHYTQKSLSLSPGK

SEQ ID NO: 1085 - protein, 248 aa, Artificial
  Synthetic
CNVNHKPSNTKVDKKVEPKSCDKTHTCPPCPAPELLGGPSVFLFPPKPKDTLMISRTPEVTCVVVDVSHEDPEVKFNWIVDGVEVHNAKTKPREEQYNSTYRVVSVLTVLHQDWLNGKEYKCKVSNKALPAPIEKTISKAKGQPREPQVYTLPPSRDELTKNQVSLTCLVKGFYPSDIAVEWESNGQPENNYKTTPPVLDSDGSFFLYSKLTVDKSRWQQGNVFSCSVMHEALHNHYTQKSLSLSPGK

SEQ ID NO: 1086 - protein, 248 aa, Artificial
  Synthetic
CNVNHKPSNTKVDKKVEPKSCDKTHTCPPCPAPELLGGPSVFLFPPKPKDTLMISRTPEVTCVVVDVSHEDPEVKFNWMVDGVEVHNAKTKPREEQYNSTYRVVSVLTVLHQDWLNGKEYKCKVSNKALPAPIEKTISKAKGQPREPQVYTLPPSRDELTKNQVSLTCLVKGFYPSDIAVEWESNGQPENNYKTTPPVLDSDGSFFLYSKLTVDKSRWQQGNVFSCSVMHEALHNHYTQKSLSLSPGK

SEQ ID NO: 1087 - protein, 248 aa, Artificial
  Synthetic
CNVNHKPSNTKVDKKVEPKSCDKTHTCPPCPAPELLGGPSVFLFPPKPKDTLMISRTPEVTCVVVDVSHEDPEVKFNWPVDGVEVHNAKTKPREEQYNSTYRVVSVLTVLHQDWLNGKEYKCKVSNKALPAPIEKTISKAKGQPREPQVYTLPPSRDELTKNQVSLTCLVKGFYPSDIAVEWESNGQPENNYKTTPPVLDSDGSFFLYSKLTVDKSRWQQGNVFSCSVMHEALHNHYTQKSLSLSPGK

SEQ ID NO: 1088 - protein, 248 aa, Artificial
  Synthetic
CNVNHKPSNTKVDKKVEPKSCDKTHTCPPCPAPELLGGPSVFLFPPKPKDTLMISRTPEVTCVVVDVSHEDPEVKFNWGVDGVEVHNAKTKPREEQYNSTYRVVSVLTVLHQDWLNGKEYKCKVSNKALPAPIEKTISKAKGQPREPQVYTLPPSRDELTKNQVSLTCLVKGFYPSDIAVEWESNGQPENNYKTTPPVLDSDGSFFLYSKLTVDKSRWQQGNVFSCSVMHEALHNHYTQKSLSLSPGK

SEQ ID NO: 1089 - protein, 248 aa, Artificial
  Synthetic
CNVNHKPSNTKVDKKVEPKSCDKTHTCPPCPAPELLGGPSVFLFPPKPKDTLMISRTPEVTCVVVDVSHEDPEVKFNWYVDGVEVHNAKTKPREEQYNSTYRVVSVLTVLHQDWLNGKEYNCKVSNKALPAPIEKTISKAKGQPREPQVYTLPPSRDELTKNQVSLTCLVKGFYPSDIAVEWESNGQPENNYKTTPPVLDSDGSFFLYSKLTVDKSRWQQGNVFSCSVMHEALHNHYTQKSLSLSPGK

SEQ ID NO: 1090 - protein, 248 aa, Artificial
  Synthetic
CNVNHKPSNTKVDKKVEPKSCDKTHTCPPCPAPELLGGPSVFLFPPKPKDTLMISRTPEVTCVVVDVSHEDPEVKFNWYVDGVEVHNAKTKPREEQYNSTYRVVSVLTVLHQDWLNGKEYSCKVSNKALPAPIEKTISKAKGQPREPQVYTLPPSRDELTKNQVSLTCLVKGFYPSDIAVEWESNGQPENNYKTTPPVLDSDGSFFLYSKLTVDKSRWQQGNVFSCSVMHEALHNHYTQKSLSLSPGK

SEQ ID NO: 1091 - protein, 248 aa, Artificial
  Synthetic
CNVNHKPSNTKVDKKVEPKSCDKTHTCPPCPAPELLGGPSVFLFPPKPKDTLMISRTPEVTCVVVDVSHEDPEVKFNWYVDGVEVHNAKTKPREEQYNSTYRVVSVLTVLHQDWLNGKEYHCKVSNKALPAPIEKTISKAKGQPREPQVYTLPPSRDELTKNQVSLTCLVKGFYPSDIAVEWESNGQPENNYKTTPPVLDSDGSFFLYSKLTVDKSRWQQGNVFSCSVMHEALHNHYTQKSLSLSPGK

SEQ ID NO: 1092 - protein, 248 aa, Artificial
  Synthetic
CNVNHKPSNTKVDKKVEPKSCDKTHTCPPCPAPELLGGPSVFLFPPKPKDTLMISRTPEVTCVVVDVSHEDPEVKFNWYVDGVEVHNAKTKPREEQYNSTYRVVSVLTVLHQDWLNGKEYVCKVSNKALPAPIEKTISKAKGQPREPQVYTLPPSRDELTKNQVSLTCLVKGFYPSDIAVEWESNGQPENNYKTTPPVLDSDGSFFLYSKLTVDKSRWQQGNVFSCSVMHEALHNHYTQKSLSLSPGK

SEQ ID NO: 1093 - protein, 248 aa, Artificial
  Synthetic
CNVNHKPSNTKVDKKVEPKSCDKTHTCPPCPAPELLGGPSVFLFPPKPKDTLMISRTPEVTCVVVDVSHEDPEVKFNWYVDGVEVHNAKTKPREEQYNSTYRVVSVLTVLHQDWLNGKEYLCKVSNKALPAPIEKTISKAKGQPREPQVYTLPPSRDELTKNQVSLTCLVKGFYPSDIAVEWESNGQPENNYKTTPPVLDSDGSFFLYSKLTVDKSRWQQGNVFSCSVMHEALHNHYTQKSLSLSPGK

SEQ ID NO: 1094 - protein, 248 aa, Artificial
  Synthetic
CNVNHKPSNTKVDKKVEPKSCDKTHTCPPCPAPELLGGPSVFLFPPKPKDTLMISRTPEVTCVVVDVSHEDPEVKFNWYVDGVEVHNAKTKPREEQYNSTYRVVSVLTVLHQDWLNGKEYFCKVSNKALPAPIEKTISKAKGQPREPQVYTLPPSRDELTKNQVSLTCLVKGFYPSDIAVEWESNGQPENNYKTTPPVLDSDGSFFLYSKLTVDKSRWQQGNVFSCSVMHEALHNHYTQKSLSLSPGK

SEQ ID NO: 1095 - protein, 248 aa, Artificial
  Synthetic
CNVNHKPSNTKVDKKVEPKSCDKTHTCPPCPAPELLGGPSVFLFPPKPKDTLMISRTPEVTCVVVDVSHEDPEVKFNWYVDGVEVHNAKTKPREEQYNSTYRVVSVLTVLHQDWLNGKEYYCKVSNKALPAPIEKTISKAKGQPREPQVYTLPPSRDELTKNQVSLTCLVKGFYPSDIAVEWESNGQPENNYKTTPPVLDSDGSFFLYSKLTVDKSRWQQGNVFSCSVMHEALHNHYTQKSLSLSPGK

SEQ ID NO: 1096 - protein, 248 aa, Artificial
  Synthetic
CNVNHKPSNTKVDKKVEPKSCDKTHTCPPCPAPELLGGPSVFLFPPKPKDTLMISRTPEVTCVVVDVSHEDPEVKFNWYVDGVEVHNAKTKPREEQYNSTYRVVSVLTVLHQDWLNGKEYWCKVSNKALPAPIEKTISKAKGQPREPQVYTLPPSRDELTKNQVSLTCLVKGFYPSDIAVEWESNGQPENNYKTTPPVLDSDGSFFLYSKLTVDKSRWQQGNVFSCSVMHEALHNHYTQKSLSLSPGK

SEQ ID NO: 1097 - protein, 248 aa, Artificial
  Synthetic
CNVNHKPSNTKVDKKVEPKSCDKTHTCPPCPAPELLGGPSVFLFPPKPKDTLMISRTPEVTCVVVDVSHEDPEVKFNWYVDGVEVHNAKTKPREEQYNSTYRVVSVLTVLHQDWLNGKEYPCKVSNKALPAPIEKTISKAKGQPREPQVYTLPPSRDELTKNQVSLTCLVKGFYPSDIAVEWESNGQPENNYKTTPPVLDSDGSFFLYSKLTVDKSRWQQGNVFSCSVMHEALHNHYTQKSLSLSPGK

SEQ ID NO: 1098 - protein, 248 aa, Artificial
  Synthetic
CNVNHKPSNTKVDKKVEPKSCDKTHTCPPCPAPELLGGPSVFLFPPKPKDTLMISRTPEVTCVVVDVSHEDPEVKFNWYVDGVEVHNAKTKPREEQYNSTYRVVSVLTVLHQDWLNGKEYGCKVSNKALPAPIEKTISKAKGQPREPQVYTLPPSRDELTKNQVSLTCLVKGFYPSDIAVEWESNGQPENNYKTTPPVLDSDGSFFLYSKLTVDKSRWQQGNVFSCSVMHEALHNHYTQKSLSLSPGK

SEQ ID NO: 1099 - protein, 248 aa, Artificial
  Synthetic
CNVNHKPSNTKVDKKVEPKSCDKTHTCPPCPAPELLGGPSVFLFPPKPKDTLMISRTPEVTCVVVDVSHEDPEVKFNWYVDGVEVHNAKTKPREEQYNSTYRVVSVLTVLHQDWLNGKEYKCDVSNKALPAPIEKTISKAKGQPREPQVYTLPPSRDELTKNQVSLTCLVKGFYPSDIAVEWESNGQPENNYKTTPPVLDSDGSFFLYSKLTVDKSRWQQGNVFSCSVMHEALHNHYTQKSLSLSPGK

SEQ ID NO: 1100 - protein, 248 aa, Artificial
  Synthetic
CNVNHKPSNTKVDKKVEPKSCDKTHTCPPCPAPELLGGPSVFLFPPKPKDTLMISRTPEVTCVVVDVSHEDPEVKFNWYVDGVEVHNAKTKPREEQYNSTYRVVSVLTVLHQDWLNGKEYKCSVSNKALPAPIEKTISKAKGQPREPQVYTLPPSRDELTKNQVSLTCLVKGFYPSDIAVEWESNGQPENNYKTTPPVLDSDGSFFLYSKLTVDKSRWQQGNVFSCSVMHEALHNHYTQKSLSLSPGK

SEQ ID NO: 1101 - protein, 248 aa, Artificial
  Synthetic
CNVNHKPSNTKVDKKVEPKSCDKTHTCPPCPAPELLGGPSVFLFPPKPKDTLMISRTPEVTCVVVDVSHEDPEVKFNWYVDGVEVHNAKTKPREEQYNSTYRVVSVLTVLHQDWLNGKEYKCVVSNKALPAPIEKTISKAKGQPREPQVYTLPPSRDELTKNQVSLTCLVKGFYPSDIAVEWESNGQPENNYKTTPPVLDSDGSFFLYSKLTVDKSRWQQGNVFSCSVMHEALHNHYTQKSLSLSPGK

SEQ ID NO: 1102 - protein, 248 aa, Artificial
  Synthetic
CNVNHKPSNTKVDKKVEPKSCDKTHTCPPCPAPELLGGPSVFLFPPKPKDTLMISRTPEVTCVVVDVSHEDPEVKFNWYVDGVEVHNAKTKPREEQYNSTYRVVSVLTVLHQDWLNGKEYKCIVSNKALPAPIEKTISKAKGQPREPQVYTLPPSRDELTKNQVSLTCLVKGFYPSDIAVEWESNGQPENNYKTTPPVLDSDGSFFLYSKLTVDKSRWQQGNVFSCSVMHEALHNHYTQKSLSLSPGK

SEQ ID NO: 1103 - protein, 248 aa, Artificial
  Synthetic
CNVNHKPSNTKVDKKVEPKSCDKTHTCPPCPAPELLGGPSVFLFPPKPKDTLMISRTPEVTCVVVDVSHEDPEVKFNWYVDGVEVHNAKTKPREEQYNSTYRVVSVLTVLHQDWLNGKEYKCFVSNKALPAPIEKTISKAKGQPREPQVYTLPPSRDELTKNQVSLTCLVKGFYPSDIAVEWESNGQPENNYKTTPPVLDSDGSFFLYSKLTVDKSRWQQGNVFSCSVMHEALHNHYTQKSLSLSPGK

SEQ ID NO: 1104 - protein, 248 aa, Artificial
  Synthetic
CNVNHKPSNTKVDKKVEPKSCDKTHTCPPCPAPELLGGPSVFLFPPKPKDTLMISRTPEVTCVVVDVSHEDPEVKFNWYVDGVEVHNAKTKPREEQYNSTYRVVSVLTVLHQDWLNGKEYKCYVSNKALPAPIEKTISKAKGQPREPQVYTLPPSRDELTKNQVSLTCLVKGFYPSDIAVEWESNGQPENNYKTTPPVLDSDGSFFLYSKLTVDKSRWQQGNVFSCSVMHEALHNHYTQKSLSLSPGK

SEQ ID NO: 1105 - protein, 248 aa, Artificial
  Synthetic
CNVNHKPSNTKVDKKVEPKSCDKTHTCPPCPAPELLGGPSVFLFPPKPKDTLMISRTPEVTCVVVDVSHEDPEVKFNWYVDGVEVHNAKTKPREEQYNSTYRVVSVLTVLHQDWLNGKEYKCWVSNKALPAPIEKTISKAKGQPREPQVYTLPPSRDELTKNQVSLTCLVKGFYPSDIAVEWESNGQPENNYKTTPPVLDSDGSFFLYSKLTVDKSRWQQGNVFSCSVMHEALHNHYTQKSLSLSPGK

SEQ ID NO: 1106 - protein, 248 aa, Artificial
  Synthetic
CNVNHKPSNTKVDKKVEPKSCDKTHTCPPCPAPELLGGPSVFLFPPKPKDTLMISRTPEVTCVVVDVSHEDPEVKFNWYVDGVEVHNAKTKPREEQYNSTYRVVSVLTVLHQDWLNGKEYKCPVSNKALPAPIEKTISKAKGQPREPQVYTLPPSRDELTKNQVSLTCLVKGFYPSDIAVEWESNGQPENNYKTTPPVLDSDGSFFLYSKLTVDKSRWQQGNVFSCSVMHEALHNHYTQKSLSLSPGK

SEQ ID NO: 1107 - protein, 248 aa, Artificial
  Synthetic
CNVNHKPSNTKVDKKVEPKSCDKTHTCPPCPAPELLGGPSVFLFPPKPKDTLMISRTPEVTCVVVDVSHEDPEVKFNWYVDGVEVHNAKTKPREEQYNSTYRVVSVLTVLHQDWLNGKEYKCGVSNKALPAPIEKTISKAKGQPREPQVYTLPPSRDELTKNQVSLTCLVKGFYPSDIAVEWESNGQPENNYKTTPPVLDSDGSFFLYSKLTVDKSRWQQGNVFSCSVMHEALHNHYTQKSLSLSPGK

SEQ ID NO: 1108 - protein, 248 aa, Artificial
  Synthetic
CNVNHKPSNTKVDKKVEPKSCDKTHTCPPCPAPELLGGPSVFLFPPKPKDTLMISRTPEVTCVVVDVSHEDPEVKFNWYVDGVEVHNAKTKPREEQYNSTYRVVSVLTVLHQDWLNGKEYKCKVSKKALPAPIEKTISKAKGQPREPQVYTLPPSRDELTKNQVSLTCLVKGFYPSDIAVEWESNGQPENNYKTTPPVLDSDGSFFLYSKLTVDKSRWQQGNVFSCSVMHEALHNHYTQKSLSLSPGK

SEQ ID NO: 1109 - protein, 248 aa, Artificial
  Synthetic
CNVNHKPSNTKVDKKVEPKSCDKTHTCPPCPAPELLGGPSVFLFPPKPKDTLMISRTPEVTCVVVDVSHEDPEVKFNWYVDGVEVHNAKTKPREEQYNSTYRVVSVLTVLHQDWLNGKEYKCKVSRKALPAPIEKTISKAKGQPREPQVYTLPPSRDELTKNQVSLTCLVKGFYPSDIAVEWESNGQPENNYKTTPPVLDSDGSFFLYSKLTVDKSRWQQGNVFSCSVMHEALHNHYTQKSLSLSPGK

SEQ ID NO: 1110 - protein, 248 aa, Artificial
  Synthetic
CNVNHKPSNTKVDKKVEPKSCDKTHTCPPCPAPELLGGPSVFLFPPKPKDTLMISRTPEVTCVVVDVSHEDPEVKFNWYVDGVEVHNAKTKPREEQYNSTYRVVSVLTVLHQDWLNGKEYKCKVSSKALPAPIEKTISKAKGQPREPQVYTLPPSRDELTKNQVSLTCLVKGFYPSDIAVEWESNGQPENNYKTTPPVLDSDGSFFLYSKLTVDKSRWQQGNVFSCSVMHEALHNHYTQKSLSLSPGK

SEQ ID NO: 1111 - protein, 248 aa, Artificial
  Synthetic
CNVNHKPSNTKVDKKVEPKSCDKTHTCPPCPAPELLGGPSVFLFPPKPKDTLMISRTPEVTCVVVDVSHEDPEVKFNWYVDGVEVHNAKTKPREEQYNSTYRVVSVLTVLHQDWLNGKEYKCKVSFKALPAPIEKTISKAKGQPREPQVYTLPPSRDELTKNQVSLTCLVKGFYPSDIAVEWESNGQPENNYKTTPPVLDSDGSFFLYSKLTVDKSRWQQGNVFSCSVMHEALHNHYTQKSLSLSPGK

SEQ ID NO: 1112 - protein, 248 aa, Artificial
  Synthetic
CNVNHKPSNTKVDKKVEPKSCDKTHTCPPCPAPELLGGPSVFLFPPKPKDTLMISRTPEVTCVVVDVSHEDPEVKFNWYVDGVEVHNAKTKPREEQYNSTYRVVSVLTVLHQDWLNGKEYKCKVSMKALPAPIEKTISKAKGQPREPQVYTLPPSRDELTKNQVSLTCLVKGFYPSDIAVEWESNGQPENNYKTTPPVLDSDGSFFLYSKLTVDKSRWQQGNVFSCSVMHEALHNHYTQKSLSLSPGK

SEQ ID NO: 1113 - protein, 248 aa, Artificial
  Synthetic
CNVNHKPSNTKVDKKVEPKSCDKTHTCPPCPAPELLGGPSVFLFPPKPKDTLMISRTPEVTCVVVDVSHEDPEVKFNWYVDGVEVHNAKTKPREEQYNSTYRVVSVLTVLHQDWLNGKEYKCKVSYKALPAPIEKTISKAKGQPREPQVYTLPPSRDELTKNQVSLTCLVKGFYPSDIAVEWESNGQPENNYKTTPPVLDSDGSFFLYSKLTVDKSRWQQGNVFSCSVMHEALHNHYTQKSLSLSPGK

SEQ ID NO: 1114 - protein, 248 aa, Artificial
  Synthetic
CNVNHKPSNTKVDKKVEPKSCDKTHTCPPCPAPELLGGPSVFLFPPKPKDTLMISRTPEVTCVVVDVSHEDPEVKFNWYVDGVEVHNAKTKPREEQYNSTYRVVSVLTVLHQDWLNGKEYKCKVSWKALPAPIEKTISKAKGQPREPQVYTLPPSRDELTKNQVSLTCLVKGFYPSDIAVEWESNGQPENNYKTTPPVLDSDGSFFLYSKLTVDKSRWQQGNVFSCSVMHEALHNHYTQKSLSLSPGK

SEQ ID NO: 1115 - protein, 248 aa, Artificial
  Synthetic
CNVNHKPSNTKVDKKVEPKSCDKTHTCPPCPAPELLGGPSVFLFPPKPKDTLMISRTPEVTCVVVDVSHEDPEVKFNWYVDGVEVHNAKTKPREEQYNSTYRVVSVLTVLHQDWLNGKEYKCKVSPKALPAPIEKTISKAKGQPREPQVYTLPPSRDELTKNQVSLTCLVKGFYPSDIAVEWESNGQPENNYKTTPPVLDSDGSFFLYSKLTVDKSRWQQGNVFSCSVMHEALHNHYTQKSLSLSPGK

SEQ ID NO: 1116 - protein, 248 aa, Artificial
  Synthetic
CNVNHKPSNTKVDKKVEPKSCDKTHTCPPCPAPELLGGPSVFLFPPKPKDTLMISRTPEVTCVVVDVSHEDPEVKFNWYVDGVEVHNAKTKPREEQYNSTYRVVSVLTVLHQDWLNGKEYKCKVSGKALPAPIEKTISKAKGQPREPQVYTLPPSRDELTKNQVSLTCLVKGFYPSDIAVEWESNGQPENNYKTTPPVLDSDGSFFLYSKLTVDKSRWQQGNVFSCSVMHEALHNHYTQKSLSLSPGK

SEQ ID NO: 1117 - protein, 248 aa, Artificial
  Synthetic
CNVNHKPSNTKVDKKVEPKSCDKTHTCEPCPAPELLGGPSVFLFPPKPKDTLMISRTPEVTCVVVDVSHEDPEVKFNWYVDGVEVHNAKTKPREEQYNSTYRVVSVLTVLHQDWLNGKEYKCKVSNKALPAPIEKTISKAKGQPREPQVYTLPPSRDELTKNQVSLTCLVKGFYPSDIAVEWESNGQPENNYKTTPPVLDSDGSFFLYSKLTVDKSRWQQGNVFSCSVMHEALHNHYTQKSLSLSPGK

SEQ ID NO: 1118 - protein, 248 aa, Artificial
  Synthetic
CNVNHKPSNTKVDKKVEPKSCDKTHTCKPCPAPELLGGPSVFLFPPKPKDTLMISRTPEVTCVVVDVSHEDPEVKFNWYVDGVEVHNAKTKPREEQYNSTYRVVSVLTVLHQDWLNGKEYKCKVSNKALPAPIEKTISKAKGQPREPQVYTLPPSRDELTKNQVSLTCLVKGFYPSDIAVEWESNGQPENNYKTTPPVLDSDGSFFLYSKLTVDKSRWQQGNVFSCSVMHEALHNHYTQKSLSLSPGK

SEQ ID NO: 1119 - protein, 248 aa, Artificial
  Synthetic
CNVNHKPSNTKVDKKVEPKSCDKTHTCYPCPAPELLGGPSVFLFPPKPKDTLMISRTPEVTCVVVDVSHEDPEVKFNWYVDGVEVHNAKTKPREEQYNSTYRVVSVLTVLHQDWLNGKEYKCKVSNKALPAPIEKTISKAKGQPREPQVYTLPPSRDELTKNQVSLTCLVKGFYPSDIAVEWESNGQPENNYKTTPPVLDSDGSFFLYSKLTVDKSRWQQGNVFSCSVMHEALHNHYTQKSLSLSPGK

SEQ ID NO: 1120 - protein, 248 aa, Artificial
  Synthetic
CNVNHKPSNTKVDKKVEPKSCDKTHTCGPCPAPELLGGPSVFLFPPKPKDTLMISRTPEVTCVVVDVSHEDPEVKFNWYVDGVEVHNAKTKPREEQYNSTYRVVSVLTVLHQDWLNGKEYKCKVSNKALPAPIEKTISKAKGQPREPQVYTLPPSRDELTKNQVSLTCLVKGFYPSDIAVEWESNGQPENNYKTTPPVLDSDGSFFLYSKLTVDKSRWQQGNVFSCSVMHEALHNHYTQKSLSLSPGK

SEQ ID NO: 1121 - protein, 248 aa, Artificial
  Synthetic
CNVNHKPSNTKVDKKVEPKSCDKTHTCPECPAPELLGGPSVFLFPPKPKDTLMISRTPEVTCVVVDVSHEDPEVKFNWYVDGVEVHNAKTKPREEQYNSTYRVVSVLTVLHQDWLNGKEYKCKVSNKALPAPIEKTISKAKGQPREPQVYTLPPSRDELTKNQVSLTCLVKGFYPSDIAVEWESNGQPENNYKTTPPVLDSDGSFFLYSKLTVDKSRWQQGNVFSCSVMHEALHNHYTQKSLSLSPGK

SEQ ID NO: 1122 - protein, 248 aa, Artificial
  Synthetic
CNVNHKPSNTKVDKKVEPKSCDKTHTCPKCPAPELLGGPSVFLFPPKPKDTLMISRTPEVTCVVVDVSHEDPEVKFNWYVDGVEVHNAKTKPREEQYNSTYRVVSVLTVLHQDWLNGKEYKCKVSNKALPAPIEKTISKAKGQPREPQVYTLPPSRDELTKNQVSLTCLVKGFYPSDIAVEWESNGQPENNYKTTPPVLDSDGSFFLYSKLTVDKSRWQQGNVFSCSVMHEALHNHYTQKSLSLSPGK

SEQ ID NO: 1123 - protein, 248 aa, Artificial
  Synthetic
CNVNHKPSNTKVDKKVEPKSCDKTHTCPYCPAPELLGGPSVFLFPPKPKDTLMISRTPEVTCVVVDVSHEDPEVKFNWYVDGVEVHNAKTKPREEQYNSTYRVVSVLTVLHQDWLNGKEYKCKVSNKALPAPIEKTISKAKGQPREPQVYTLPPSRDELTKNQVSLTCLVKGFYPSDIAVEWESNGQPENNYKTTPPVLDSDGSFFLYSKLTVDKSRWQQGNVFSCSVMHEALHNHYTQKSLSLSPGK

SEQ ID NO: 1124 - protein, 248 aa, Artificial
  Synthetic
CNVNHKPSNTKVDKKVEPKSCDKTHTCPGCPAPELLGGPSVFLFPPKPKDTLMISRTPEVTCVVVDVSHEDPEVKFNWYVDGVEVHNAKTKPREEQYNSTYRVVSVLTVLHQDWLNGKEYKCKVSNKALPAPIEKTISKAKGQPREPQVYTLPPSRDELTKNQVSLTCLVKGFYPSDIAVEWESNGQPENNYKTTPPVLDSDGSFFLYSKLTVDKSRWQQGNVFSCSVMHEALHNHYTQKSLSLSPGK

SEQ ID NO: 1125 - protein, 248 aa, Artificial
  Synthetic
CNVNHKPSNTKVDKKVEPKSCDKTHTCPPCPAPELLDGPSVFLFPPKPKDTLMISRTPEVTCVVVDVSHEDPEVKFNWYVDGVEVHNAKTKPREEQYNSTYRVVSVLTVLHQDWLNGKEYKCKVSNKALPAPIEKTISKAKGQPREPQVYTLPPSRDELTKNQVSLTCLVKGFYPSDIAVEWESNGQPENNYKTTPPVLDSDGSFFLYSKLTVDKSRWQQGNVFSCSVMHEALHNHYTQKSLSLSPGK

SEQ ID NO: 1126 - protein, 248 aa, Artificial
  Synthetic
CNVNHKPSNTKVDKKVEPKSCDKTHTCPPCPAPELLEGPSVFLFPPKPKDTLMISRTPEVTCVVVDVSHEDPEVKFNWYVDGVEVHNAKTKPREEQYNSTYRVVSVLTVLHQDWLNGKEYKCKVSNKALPAPIEKTISKAKGQPREPQVYTLPPSRDELTKNQVSLTCLVKGFYPSDIAVEWESNGQPENNYKTTPPVLDSDGSFFLYSKLTVDKSRWQQGNVFSCSVMHEALHNHYTQKSLSLSPGK

SEQ ID NO: 1127 - protein, 248 aa, Artificial
  Synthetic
CNVNHKPSNTKVDKKVEPKSCDKTHTCPPCPAPELLNGPSVFLFPPKPKDTLMISRTPEVTCVVVDVSHEDPEVKFNWYVDGVEVHNAKTKPREEQYNSTYRVVSVLTVLHQDWLNGKEYKCKVSNKALPAPIEKTISKAKGQPREPQVYTLPPSRDELTKNQVSLTCLVKGFYPSDIAVEWESNGQPENNYKTTPPVLDSDGSFFLYSKLTVDKSRWQQGNVFSCSVMHEALHNHYTQKSLSLSPGK

SEQ ID NO: 1128 - protein, 248 aa, Artificial
  Synthetic
CNVNHKPSNTKVDKKVEPKSCDKTHTCPPCPAPELLQGPSVFLFPPKPKDTLMISRTPEVTCVVVDVSHEDPEVKFNWYVDGVEVHNAKTKPREEQYNSTYRVVSVLTVLHQDWLNGKEYKCKVSNKALPAPIEKTISKAKGQPREPQVYTLPPSRDELTKNQVSLTCLVKGFYPSDIAVEWESNGQPENNYKTTPPVLDSDGSFFLYSKLTVDKSRWQQGNVFSCSVMHEALHNHYTQKSLSLSPGK

SEQ ID NO: 1129 - protein, 248 aa, Artificial
  Synthetic
CNVNHKPSNTKVDKKVEPKSCDKTHTCPPCPAPELLKGPSVFLFPPKPKDTLMISRTPEVTCVVVDVSHEDPEVKFNWYVDGVEVHNAKTKPREEQYNSTYRVVSVLTVLHQDWLNGKEYKCKVSNKALPAPIEKTISKAKGQPREPQVYTLPPSRDELTKNQVSLTCLVKGFYPSDIAVEWESNGQPENNYKTTPPVLDSDGSFFLYSKLTVDKSRWQQGNVFSCSVMHEALHNHYTQKSLSLSPGK

SEQ ID NO: 1130 - protein, 248 aa, Artificial
  Synthetic
CNVNHKPSNTKVDKKVEPKSCDKTHTCPPCPAPELLRGPSVFLFPPKPKDTLMISRTPEVTCVVVDVSHEDPEVKFNWYVDGVEVHNAKTKPREEQYNSTYRVVSVLTVLHQDWLNGKEYKCKVSNKALPAPIEKTISKAKGQPREPQVYTLPPSRDELTKNQVSLTCLVKGFYPSDIAVEWESNGQPENNYKTTPPVLDSDGSFFLYSKLTVDKSRWQQGNVFSCSVMHEALHNHYTQKSLSLSPGK

SEQ ID NO: 1131 - protein, 248 aa, Artificial
  Synthetic
CNVNHKPSNTKVDKKVEPKSCDKTHTCPPCPAPELLSGPSVFLFPPKPKDTLMISRTPEVTCVVVDVSHEDPEVKFNWYVDGVEVHNAKTKPREEQYNSTYRVVSVLTVLHQDWLNGKEYKCKVSNKALPAPIEKTISKAKGQPREPQVYTLPPSRDELTKNQVSLTCLVKGFYPSDIAVEWESNGQPENNYKTTPPVLDSDGSFFLYSKLTVDKSRWQQGNVFSCSVMHEALHNHYTQKSLSLSPGK

SEQ ID NO: 1132 - protein, 248 aa, Artificial
  Synthetic
CNVNHKPSNTKVDKKVEPKSCDKTHTCPPCPAPELLTGPSVFLFPPKPKDTLMISRTPEVTCVVVDVSHEDPEVKFNWYVDGVEVHNAKTKPREEQYNSTYRVVSVLTVLHQDWLNGKEYKCKVSNKALPAPIEKTISKAKGQPREPQVYTLPPSRDELTKNQVSLTCLVKGFYPSDIAVEWESNGQPENNYKTTPPVLDSDGSFFLYSKLTVDKSRWQQGNVFSCSVMHEALHNHYTQKSLSLSPGK

SEQ ID NO: 1133 - protein, 248 aa, Artificial
  Synthetic
CNVNHKPSNTKVDKKVEPKSCDKTHTCPPCPAPELLHGPSVFLFPPKPKDTLMISRTPEVTCVVVDVSHEDPEVKFNWYVDGVEVHNAKTKPREEQYNSTYRVVSVLTVLHQDWLNGKEYKCKVSNKALPAPIEKTISKAKGQPREPQVYTLPPSRDELTKNQVSLTCLVKGFYPSDIAVEWESNGQPENNYKTTPPVLDSDGSFFLYSKLTVDKSRWQQGNVFSCSVMHEALHNHYTQKSLSLSPGK

SEQ ID NO: 1134 - protein, 248 aa, Artificial
  Synthetic
CNVNHKPSNTKVDKKVEPKSCDKTHTCPPCPAPELLAGPSVFLFPPKPKDTLMISRTPEVTCVVVDVSHEDPEVKFNWYVDGVEVHNAKTKPREEQYNSTYRVVSVLTVLHQDWLNGKEYKCKVSNKALPAPIEKTISKAKGQPREPQVYTLPPSRDELTKNQVSLTCLVKGFYPSDIAVEWESNGQPENNYKTTPPVLDSDGSFFLYSKLTVDKSRWQQGNVFSCSVMHEALHNHYTQKSLSLSPGK

SEQ ID NO: 1135 - protein, 248 aa, Artificial
  Synthetic
CNVNHKPSNTKVDKKVEPKSCDKTHTCPPCPAPELLVGPSVFLFPPKPKDTLMISRTPEVTCVVVDVSHEDPEVKFNWYVDGVEVHNAKTKPREEQYNSTYRVVSVLTVLHQDWLNGKEYKCKVSNKALPAPIEKTISKAKGQPREPQVYTLPPSRDELTKNQVSLTCLVKGFYPSDIAVEWESNGQPENNYKTTPPVLDSDGSFFLYSKLTVDKSRWQQGNVFSCSVMHEALHNHYTQKSLSLSPGK

SEQ ID NO: 1136 - protein, 248 aa, Artificial
  Synthetic
CNVNHKPSNTKVDKKVEPKSCDKTHTCPPCPAPELLLGPSVFLFPPKPKDTLMISRTPEVTCVVVDVSHEDPEVKFNWYVDGVEVHNAKTKPREEQYNSTYRVVSVLTVLHQDWLNGKEYKCKVSNKALPAPIEKTISKAKGQPREPQVYTLPPSRDELTKNQVSLTCLVKGFYPSDIAVEWESNGQPENNYKTTPPVLDSDGSFFLYSKLTVDKSRWQQGNVFSCSVMHEALHNHYTQKSLSLSPGK

SEQ ID NO: 1137 - protein, 248 aa, Artificial
  Synthetic
CNVNHKPSNTKVDKKVEPKSCDKTHTCPPCPAPELLIGPSVFLFPPKPKDTLMISRTPEVTCVVVDVSHEDPEVKFNWYVDGVEVHNAKTKPREEQYNSTYRVVSVLTVLHQDWLNGKEYKCKVSNKALPAPIEKTISKAKGQPREPQVYTLPPSRDELTKNQVSLTCLVKGFYPSDIAVEWESNGQPENNYKTTPPVLDSDGSFFLYSKLTVDKSRWQQGNVFSCSVMHEALHNHYTQKSLSLSPGK

SEQ ID NO: 1138 - protein, 248 aa, Artificial
  Synthetic
CNVNHKPSNTKVDKKVEPKSCDKTHTCPPCPAPELLFGPSVFLFPPKPKDTLMISRTPEVTCVVVDVSHEDPEVKFNWYVDGVEVHNAKTKPREEQYNSTYRVVSVLTVLHQDWLNGKEYKCKVSNKALPAPIEKTISKAKGQPREPQVYTLPPSRDELTKNQVSLTCLVKGFYPSDIAVEWESNGQPENNYKTTPPVLDSDGSFFLYSKLTVDKSRWQQGNVFSCSVMHEALHNHYTQKSLSLSPGK

SEQ ID NO: 1139 - protein, 248 aa, Artificial
  Synthetic
CNVNHKPSNTKVDKKVEPKSCDKTHTCPPCPAPELLMGPSVFLFPPKPKDTLMISRTPEVTCVVVDVSHEDPEVKFNWYVDGVEVHNAKTKPREEQYNSTYRVVSVLTVLHQDWLNGKEYKCKVSNKALPAPIEKTISKAKGQPREPQVYTLPPSRDELTKNQVSLTCLVKGFYPSDIAVEWESNGQPENNYKTTPPVLDSDGSFFLYSKLTVDKSRWQQGNVFSCSVMHEALHNHYTQKSLSLSPGK

SEQ ID NO: 1140 - protein, 248 aa, Artificial
  Synthetic
CNVNHKPSNTKVDKKVEPKSCDKTHTCPPCPAPELLYGPSVFLFPPKPKDTLMISRTPEVTCVVVDVSHEDPEVKFNWYVDGVEVHNAKTKPREEQYNSTYRVVSVLTVLHQDWLNGKEYKCKVSNKALPAPIEKTISKAKGQPREPQVYTLPPSRDELTKNQVSLTCLVKGFYPSDIAVEWESNGQPENNYKTTPPVLDSDGSFFLYSKLTVDKSRWQQGNVFSCSVMHEALHNHYTQKSLSLSPGK

SEQ ID NO: 1141 - protein, 248 aa, Artificial
  Synthetic
CNVNHKPSNTKVDKKVEPKSCDKTHTCPPCPAPELLWGPSVFLFPPKPKDTLMISRTPEVTCVVVDVSHEDPEVKFNWYVDGVEVHNAKTKPREEQYNSTYRVVSVLTVLHQDWLNGKEYKCKVSNKALPAPIEKTISKAKGQPREPQVYTLPPSRDELTKNQVSLTCLVKGFYPSDIAVEWESNGQPENNYKTTPPVLDSDGSFFLYSKLTVDKSRWQQGNVFSCSVMHEALHNHYTQKSLSLSPGK

SEQ ID NO: 1142 - protein, 248 aa, Artificial
  Synthetic
CNVNHKPSNTKVDKKVEPKSCDKTHTCPPCPAPELLPGPSVFLFPPKPKDTLMISRTPEVTCVVVDVSHEDPEVKFNWYVDGVEVHNAKTKPREEQYNSTYRVVSVLTVLHQDWLNGKEYKCKVSNKALPAPIEKTISKAKGQPREPQVYTLPPSRDELTKNQVSLTCLVKGFYPSDIAVEWESNGQPENNYKTTPPVLDSDGSFFLYSKLTVDKSRWQQGNVFSCSVMHEALHNHYTQKSLSLSPGK

SEQ ID NO: 1143 - protein, 248 aa, Artificial
  Synthetic
CNVNHKPSNTKVDKKVEPKSCDKTHTCPPCPAPELLGDPSVFLFPPKPKDTLMISRTPEVTCVVVDVSHEDPEVKFNWYVDGVEVHNAKTKPREEQYNSTYRVVSVLTVLHQDWLNGKEYKCKVSNKALPAPIEKTISKAKGQPREPQVYTLPPSRDELTKNQVSLTCLVKGFYPSDIAVEWESNGQPENNYKTTPPVLDSDGSFFLYSKLTVDKSRWQQGNVFSCSVMHEALHNHYTQKSLSLSPGK

SEQ ID NO: 1144 - protein, 248 aa, Artificial
  Synthetic
CNVNHKPSNTKVDKKVEPKSCDKTHTCPPCPAPELLGEPSVFLFPPKPKDTLMISRTPEVTCVVVDVSHEDPEVKFNWYVDGVEVHNAKTKPREEQYNSTYRVVSVLTVLHQDWLNGKEYKCKVSNKALPAPIEKTISKAKGQPREPQVYTLPPSRDELTKNQVSLTCLVKGFYPSDIAVEWESNGQPENNYKTTPPVLDSDGSFFLYSKLTVDKSRWQQGNVFSCSVMHEALHNHYTQKSLSLSPGK

SEQ ID NO: 1145 - protein, 248 aa, Artificial
  Synthetic
CNVNHKPSNTKVDKKVEPKSCDKTHTCPPCPAPELLGNPSVFLFPPKPKDTLMISRTPEVTCVVVDVSHEDPEVKFNWYVDGVEVHNAKTKPREEQYNSTYRVVSVLTVLHQDWLNGKEYKCKVSNKALPAPIEKTISKAKGQPREPQVYTLPPSRDELTKNQVSLTCLVKGFYPSDIAVEWESNGQPENNYKTTPPVLDSDGSFFLYSKLTVDKSRWQQGNVFSCSVMHEALHNHYTQKSLSLSPGK

SEQ ID NO: 1146 - protein, 248 aa, Artificial
  Synthetic
CNVNHKPSNTKVDKKVEPKSCDKTHTCPPCPAPELLGQPSVFLFPPKPKDTLMISRTPEVTCVVVDVSHEDPEVKFNWYVDGVEVHNAKTKPREEQYNSTYRVVSVLTVLHQDWLNGKEYKCKVSNKALPAPIEKTISKAKGQPREPQVYTLPPSRDELTKNQVSLTCLVKGFYPSDIAVEWESNGQPENNYKTTPPVLDSDGSFFLYSKLTVDKSRWQQGNVFSCSVMHEALHNHYTQKSLSLSPGK

SEQ ID NO: 1147 - protein, 248 aa, Artificial
  Synthetic
CNVNHKPSNTKVDKKVEPKSCDKTHTCPPCPAPELLGKPSVFLFPPKPKDTLMISRTPEVTCVVVDVSHEDPEVKFNWYVDGVEVHNAKTKPREEQYNSTYRVVSVLTVLHQDWLNGKEYKCKVSNKALPAPIEKTISKAKGQPREPQVYTLPPSRDELTKNQVSLTCLVKGFYPSDIAVEWESNGQPENNYKTTPPVLDSDGSFFLYSKLTVDKSRWQQGNVFSCSVMHEALHNHYTQKSLSLSPGK

SEQ ID NO: 1148 - protein, 248 aa, Artificial
  Synthetic
CNVNHKPSNTKVDKKVEPKSCDKTHTCPPCPAPELLGRPSVFLFPPKPKDTLMISRTPEVTCVVVDVSHEDPEVKFNWYVDGVEVHNAKTKPREEQYNSTYRVVSVLTVLHQDWLNGKEYKCKVSNKALPAPIEKTISKAKGQPREPQVYTLPPSRDELTKNQVSLTCLVKGFYPSDIAVEWESNGQPENNYKTTPPVLDSDGSFFLYSKLTVDKSRWQQGNVFSCSVMHEALHNHYTQKSLSLSPGK

SEQ ID NO: 1149 - protein, 248 aa, Artificial
  Synthetic
CNVNHKPSNTKVDKKVEPKSCDKTHTCPPCPAPELLGSPSVFLFPPKPKDTLMISRTPEVTCVVVDVSHEDPEVKFNWYVDGVEVHNAKTKPREEQYNSTYRVVSVLTVLHQDWLNGKEYKCKVSNKALPAPIEKTISKAKGQPREPQVYTLPPSRDELTKNQVSLTCLVKGFYPSDIAVEWESNGQPENNYKTTPPVLDSDGSFFLYSKLTVDKSRWQQGNVFSCSVMHEALHNHYTQKSLSLSPGK

SEQ ID NO: 1150 - protein, 248 aa, Artificial
  Synthetic
CNVNHKPSNTKVDKKVEPKSCDKTHTCPPCPAPELLGTPSVFLFPPKPKDTLMISRTPEVTCVVVDVSHEDPEVKFNWYVDGVEVHNAKTKPREEQYNSTYRVVSVLTVLHQDWLNGKEYKCKVSNKALPAPIEKTISKAKGQPREPQVYTLPPSRDELTKNQVSLTCLVKGFYPSDIAVEWESNGQPENNYKTTPPVLDSDGSFFLYSKLTVDKSRWQQGNVFSCSVMHEALHNHYTQKSLSLSPGK

SEQ ID NO: 1151 - protein, 248 aa, Artificial
  Synthetic
CNVNHKPSNTKVDKKVEPKSCDKTHTCPPCPAPELLGHPSVFLFPPKPKDTLMISRTPEVTCVVVDVSHEDPEVKFNWYVDGVEVHNAKTKPREEQYNSTYRVVSVLTVLHQDWLNGKEYKCKVSNKALPAPIEKTISKAKGQPREPQVYTLPPSRDELTKNQVSLTCLVKGFYPSDIAVEWESNGQPENNYKTTPPVLDSDGSFFLYSKLTVDKSRWQQGNVFSCSVMHEALHNHYTQKSLSLSPGK

SEQ ID NO: 1152 - protein, 248 aa, Artificial
  Synthetic
CNVNHKPSNTKVDKKVEPKSCDKTHTCPPCPAPELLGVPSVFLFPPKPKDTLMISRTPEVTCVVVDVSHEDPEVKFNWYVDGVEVHNAKTKPREEQYNSTYRVVSVLTVLHQDWLNGKEYKCKVSNKALPAPIEKTISKAKGQPREPQVYTLPPSRDELTKNQVSLTCLVKGFYPSDIAVEWESNGQPENNYKTTPPVLDSDGSFFLYSKLTVDKSRWQQGNVFSCSVMHEALHNHYTQKSLSLSPGK

SEQ ID NO: 1153 - protein, 248 aa, Artificial
  Synthetic
CNVNHKPSNTKVDKKVEPKSCDKTHTCPPCPAPELLGLPSVFLFPPKPKDTLMISRTPEVTCVVVDVSHEDPEVKFNWYVDGVEVHNAKTKPREEQYNSTYRVVSVLTVLHQDWLNGKEYKCKVSNKALPAPIEKTISKAKGQPREPQVYTLPPSRDELTKNQVSLTCLVKGFYPSDIAVEWESNGQPENNYKTTPPVLDSDGSFFLYSKLTVDKSRWQQGNVFSCSVMHEALHNHYTQKSLSLSPGK

SEQ ID NO: 1154 - protein, 248 aa, Artificial
  Synthetic
CNVNHKPSNTKVDKKVEPKSCDKTHTCPPCPAPELLGIPSVFLFPPKPKDTLMISRTPEVTCVVVDVSHEDPEVKFNWYVDGVEVHNAKTKPREEQYNSTYRVVSVLTVLHQDWLNGKEYKCKVSNKALPAPIEKTISKAKGQPREPQVYTLPPSRDELTKNQVSLTCLVKGFYPSDIAVEWESNGQPENNYKTTPPVLDSDGSFFLYSKLTVDKSRWQQGNVFSCSVMHEALHNHYTQKSLSLSPGK

SEQ ID NO: 1155 - protein, 248 aa, Artificial
  Synthetic
CNVNHKPSNTKVDKKVEPKSCDKTHTCPPCPAPELLGFPSVFLFPPKPKDTLMISRTPEVTCVVVDVSHEDPEVKFNWYVDGVEVHNAKTKPREEQYNSTYRVVSVLTVLHQDWLNGKEYKCKVSNKALPAPIEKTISKAKGQPREPQVYTLPPSRDELTKNQVSLTCLVKGFYPSDIAVEWESNGQPENNYKTTPPVLDSDGSFFLYSKLTVDKSRWQQGNVFSCSVMHEALHNHYTQKSLSLSPGK

SEQ ID NO: 1156 - protein, 248 aa, Artificial
  Synthetic
CNVNHKPSNTKVDKKVEPKSCDKTHTCPPCPAPELLGMPSVFLFPPKPKDTLMISRTPEVTCVVVDVSHEDPEVKFNWYVDGVEVHNAKTKPREEQYNSTYRVVSVLTVLHQDWLNGKEYKCKVSNKALPAPIEKTISKAKGQPREPQVYTLPPSRDELTKNQVSLTCLVKGFYPSDIAVEWESNGQPENNYKTTPPVLDSDGSFFLYSKLTVDKSRWQQGNVFSCSVMHEALHNHYTQKSLSLSPGK

SEQ ID NO: 1157 - protein, 248 aa, Artificial
  Synthetic
CNVNHKPSNTKVDKKVEPKSCDKTHTCPPCPAPELLGYPSVFLFPPKPKDTLMISRTPEVTCVVVDVSHEDPEVKFNWYVDGVEVHNAKTKPREEQYNSTYRVVSVLTVLHQDWLNGKEYKCKVSNKALPAPIEKTISKAKGQPREPQVYTLPPSRDELTKNQVSLTCLVKGFYPSDIAVEWESNGQPENNYKTTPPVLDSDGSFFLYSKLTVDKSRWQQGNVFSCSVMHEALHNHYTQKSLSLSPGK

SEQ ID NO: 1158 - protein, 248 aa, Artificial
  Synthetic
CNVNHKPSNTKVDKKVEPKSCDKTHTCPPCPAPELLGWPSVFLFPPKPKDTLMISRTPEVTCVVVDVSHEDPEVKFNWYVDGVEVHNAKTKPREEQYNSTYRVVSVLTVLHQDWLNGKEYKCKVSNKALPAPIEKTISKAKGQPREPQVYTLPPSRDELTKNQVSLTCLVKGFYPSDIAVEWESNGQPENNYKTTPPVLDSDGSFFLYSKLTVDKSRWQQGNVFSCSVMHEALHNHYTQKSLSLSPGK

SEQ ID NO: 1159 - protein, 248 aa, Artificial
  Synthetic
CNVNHKPSNTKVDKKVEPKSCDKTHTCPPCPAPELLGPPSVFLFPPKPKDTLMISRTPEVTCVVVDVSHEDPEVKFNWYVDGVEVHNAKTKPREEQYNSTYRVVSVLTVLHQDWLNGKEYKCKVSNKALPAPIEKTISKAKGQPREPQVYTLPPSRDELTKNQVSLTCLVKGFYPSDIAVEWESNGQPENNYKTTPPVLDSDGSFFLYSKLTVDKSRWQQGNVFSCSVMHEALHNHYTQKSLSLSPGK

SEQ ID NO: 1160 - protein, 248 aa, Artificial
  Synthetic
CNVNHKPSNTKVDKKVEPKSCDKTHTCPPCPAPELLGGDSVFLFPPKPKDTLMISRTPEVTCVVVDVSHEDPEVKFNWYVDGVEVHNAKTKPREEQYNSTYRVVSVLTVLHQDWLNGKEYKCKVSNKALPAPIEKTISKAKGQPREPQVYTLPPSRDELTKNQVSLTCLVKGFYPSDIAVEWESNGQPENNYKTTPPVLDSDGSFFLYSKLTVDKSRWQQGNVFSCSVMHEALHNHYTQKSLSLSPGK

SEQ ID NO: 1161 - protein, 248 aa, Artificial
  Synthetic
CNVNHKPSNTKVDKKVEPKSCDKTHTCPPCPAPELLGGESVFLFPPKPKDTLMISRTPEVTCVVVDVSHEDPEVKFNWYVDGVEVHNAKTKPREEQYNSTYRVVSVLTVLHQDWLNGKEYKCKVSNKALPAPIEKTISKAKGQPREPQVYTLPPSRDELTKNQVSLTCLVKGFYPSDIAVEWESNGQPENNYKTTPPVLDSDGSFFLYSKLTVDKSRWQQGNVFSCSVMHEALHNHYTQKSLSLSPGK

SEQ ID NO: 1162 - protein, 248 aa, Artificial
  Synthetic
CNVNHKPSNTKVDKKVEPKSCDKTHTCPPCPAPELLGGNSVFLFPPKPKDTLMISRTPEVTCVVVDVSHEDPEVKFNWYVDGVEVHNAKTKPREEQYNSTYRVVSVLTVLHQDWLNGKEYKCKVSNKALPAPIEKTISKAKGQPREPQVYTLPPSRDELTKNQVSLTCLVKGFYPSDIAVEWESNGQPENNYKTTPPVLDSDGSFFLYSKLTVDKSRWQQGNVFSCSVMHEALHNHYTQKSLSLSPGK

SEQ ID NO: 1163 - protein, 248 aa, Artificial
  Synthetic
CNVNHKPSNTKVDKKVEPKSCDKTHTCPPCPAPELLGGQSVFLFPPKPKDTLMISRTPEVTCVVVDVSHEDPEVKFNWYVDGVEVHNAKTKPREEQYNSTYRVVSVLTVLHQDWLNGKEYKCKVSNKALPAPIEKTISKAKGQPREPQVYTLPPSRDELTKNQVSLTCLVKGFYPSDIAVEWESNGQPENNYKTTPPVLDSDGSFFLYSKLTVDKSRWQQGNVFSCSVMHEALHNHYTQKSLSLSPGK

SEQ ID NO: 1164 - protein, 248 aa, Artificial
  Synthetic
CNVNHKPSNTKVDKKVEPKSCDKTHTCPPCPAPELLGGKSVFLFPPKPKDTLMISRTPEVTCVVVDVSHEDPEVKFNWYVDGVEVHNAKTKPREEQYNSTYRVVSVLTVLHQDWLNGKEYKCKVSNKALPAPIEKTISKAKGQPREPQVYTLPPSRDELTKNQVSLTCLVKGFYPSDIAVEWESNGQPENNYKTTPPVLDSDGSFFLYSKLTVDKSRWQQGNVFSCSVMHEALHNHYTQKSLSLSPGK

SEQ ID NO: 1165 - protein, 248 aa, Artificial
  Synthetic
CNVNHKPSNTKVDKKVEPKSCDKTHTCPPCPAPELLGGRSVFLFPPKPKDTLMISRTPEVTCVVVDVSHEDPEVKFNWYVDGVEVHNAKTKPREEQYNSTYRVVSVLTVLHQDWLNGKEYKCKVSNKALPAPIEKTISKAKGQPREPQVYTLPPSRDELTKNQVSLTCLVKGFYPSDIAVEWESNGQPENNYKTTPPVLDSDGSFFLYSKLTVDKSRWQQGNVFSCSVMHEALHNHYTQKSLSLSPGK

SEQ ID NO: 1166 - protein, 248 aa, Artificial
  Synthetic
CNVNHKPSNTKVDKKVEPKSCDKTHTCPPCPAPELLGGSSVFLFPPKPKDTLMISRTPEVTCVVVDVSHEDPEVKFNWYVDGVEVHNAKTKPREEQYNSTYRVVSVLTVLHQDWLNGKEYKCKVSNKALPAPIEKTISKAKGQPREPQVYTLPPSRDELTKNQVSLTCLVKGFYPSDIAVEWESNGQPENNYKTTPPVLDSDGSFFLYSKLTVDKSRWQQGNVFSCSVMHEALHNHYTQKSLSLSPGK

SEQ ID NO: 1167 - protein, 248 aa, Artificial
  Synthetic
CNVNHKPSNTKVDKKVEPKSCDKTHTCPPCPAPELLGGTSVFLFPPKPKDTLMISRTPEVTCVVVDVSHEDPEVKFNWYVDGVEVHNAKTKPREEQYNSTYRVVSVLTVLHQDWLNGKEYKCKVSNKALPAPIEKTISKAKGQPREPQVYTLPPSRDELTKNQVSLTCLVKGFYPSDIAVEWESNGQPENNYKTTPPVLDSDGSFFLYSKLTVDKSRWQQGNVFSCSVMHEALHNHYTQKSLSLSPGK

SEQ ID NO: 1168 - protein, 248 aa, Artificial
  Synthetic
CNVNHKPSNTKVDKKVEPKSCDKTHTCPPCPAPELLGGHSVFLFPPKPKDTLMISRTPEVTCVVVDVSHEDPEVKFNWYVDGVEVHNAKTKPREEQYNSTYRVVSVLTVLHQDWLNGKEYKCKVSNKALPAPIEKTISKAKGQPREPQVYTLPPSRDELTKNQVSLTCLVKGFYPSDIAVEWESNGQPENNYKTTPPVLDSDGSFFLYSKLTVDKSRWQQGNVFSCSVMHEALHNHYTQKSLSLSPGK

SEQ ID NO: 1169 - protein, 248 aa, Artificial
  Synthetic
CNVNHKPSNTKVDKKVEPKSCDKTHTCPPCPAPELLGGVSVFLFPPKPKDTLMISRTPEVTCVVVDVSHEDPEVKFNWYVDGVEVHNAKTKPREEQYNSTYRVVSVLTVLHQDWLNGKEYKCKVSNKALPAPIEKTISKAKGQPREPQVYTLPPSRDELTKNQVSLTCLVKGFYPSDIAVEWESNGQPENNYKTTPPVLDSDGSFFLYSKLTVDKSRWQQGNVFSCSVMHEALHNHYTQKSLSLSPGK

SEQ ID NO: 1170 - protein, 248 aa, Artificial
  Synthetic
CNVNHKPSNTKVDKKVEPKSCDKTHTCPPCPAPELLGGLSVFLFPPKPKDTLMISRTPEVTCVVVDVSHEDPEVKFNWYVDGVEVHNAKTKPREEQYNSTYRVVSVLTVLHQDWLNGKEYKCKVSNKALPAPIEKTISKAKGQPREPQVYTLPPSRDELTKNQVSLTCLVKGFYPSDIAVEWESNGQPENNYKTTPPVLDSDGSFFLYSKLTVDKSRWQQGNVFSCSVMHEALHNHYTQKSLSLSPGK

SEQ ID NO: 1171 - protein, 248 aa, Artificial
  Synthetic
CNVNHKPSNTKVDKKVEPKSCDKTHTCPPCPAPELLGGISVFLFPPKPKDTLMISRTPEVTCVVVDVSHEDPEVKFNWYVDGVEVHNAKTKPREEQYNSTYRVVSVLTVLHQDWLNGKEYKCKVSNKALPAPIEKTISKAKGQPREPQVYTLPPSRDELTKNQVSLTCLVKGFYPSDIAVEWESNGQPENNYKTTPPVLDSDGSFFLYSKLTVDKSRWQQGNVFSCSVMHEALHNHYTQKSLSLSPGK

SEQ ID NO: 1172 - protein, 248 aa, Artificial
  Synthetic
CNVNHKPSNTKVDKKVEPKSCDKTHTCPPCPAPELLGGFSVFLFPPKPKDTLMISRTPEVTCVVVDVSHEDPEVKFNWYVDGVEVHNAKTKPREEQYNSTYRVVSVLTVLHQDWLNGKEYKCKVSNKALPAPIEKTISKAKGQPREPQVYTLPPSRDELTKNQVSLTCLVKGFYPSDIAVEWESNGQPENNYKTTPPVLDSDGSFFLYSKLTVDKSRWQQGNVFSCSVMHEALHNHYTQKSLSLSPGK

SEQ ID NO: 1173 - protein, 248 aa, Artificial
  Synthetic
CNVNHKPSNTKVDKKVEPKSCDKTHTCPPCPAPELLGGMSVFLFPPKPKDTLMISRTPEVTCVVVDVSHEDPEVKFNWYVDGVEVHNAKTKPREEQYNSTYRVVSVLTVLHQDWLNGKEYKCKVSNKALPAPIEKTISKAKGQPREPQVYTLPPSRDELTKNQVSLTCLVKGFYPSDIAVEWESNGQPENNYKTTPPVLDSDGSFFLYSKLTVDKSRWQQGNVFSCSVMHEALHNHYTQKSLSLSPGK

SEQ ID NO: 1174 - protein, 248 aa, Artificial
  Synthetic
CNVNHKPSNTKVDKKVEPKSCDKTHTCPPCPAPELLGGYSVFLFPPKPKDTLMISRTPEVTCVVVDVSHEDPEVKFNWYVDGVEVHNAKTKPREEQYNSTYRVVSVLTVLHQDWLNGKEYKCKVSNKALPAPIEKTISKAKGQPREPQVYTLPPSRDELTKNQVSLTCLVKGFYPSDIAVEWESNGQPENNYKTTPPVLDSDGSFFLYSKLTVDKSRWQQGNVFSCSVMHEALHNHYTQKSLSLSPGK

SEQ ID NO: 1175 - protein, 248 aa, Artificial
  Synthetic
CNVNHKPSNTKVDKKVEPKSCDKTHTCPPCPAPELLGGWSVFLFPPKPKDTLMISRTPEVTCVVVDVSHEDPEVKFNWYVDGVEVHNAKTKPREEQYNSTYRVVSVLTVLHQDWLNGKEYKCKVSNKALPAPIEKTISKAKGQPREPQVYTLPPSRDELTKNQVSLTCLVKGFYPSDIAVEWESNGQPENNYKTTPPVLDSDGSFFLYSKLTVDKSRWQQGNVFSCSVMHEALHNHYTQKSLSLSPGK

SEQ ID NO: 1176 - protein, 248 aa, Artificial
  Synthetic
CNVNHKPSNTKVDKKVEPKSCDKTHTCPPCPAPELLGGGSVFLFPPKPKDTLMISRTPEVTCVVVDVSHEDPEVKFNWYVDGVEVHNAKTKPREEQYNSTYRVVSVLTVLHQDWLNGKEYKCKVSNKALPAPIEKTISKAKGQPREPQVYTLPPSRDELTKNQVSLTCLVKGFYPSDIAVEWESNGQPENNYKTTPPVLDSDGSFFLYSKLTVDKSRWQQGNVFSCSVMHEALHNHYTQKSLSLSPGK

SEQ ID NO: 1177 - protein, 248 aa, Artificial
  Synthetic
CNVNHKPSNTKVDKKVEPKSCDKTHTCPPCPAPELLGGPSVFLFPPKPKDTLMISRTPEVTCVVVDVSHKDPEVKFNWYVDGVEVHNAKTKPREEQYNSTYRVVSVLTVLHQDWLNGKEYKCKVSNKALPAPIEKTISKAKGQPREPQVYTLPPSRDELTKNQVSLTCLVKGFYPSDIAVEWESNGQPENNYKTTPPVLDSDGSFFLYSKLTVDKSRWQQGNVFSCSVMHEALHNHYTQKSLSLSPGK

SEQ ID NO: 1178 - protein, 248 aa, Artificial
  Synthetic
CNVNHKPSNTKVDKKVEPKSCDKTHTCPPCPAPELLGGPSVFLFPPKPKDTLMISRTPEVTCVVVDVSHSDPEVKFNWYVDGVEVHNAKTKPREEQYNSTYRVVSVLTVLHQDWLNGKEYKCKVSNKALPAPIEKTISKAKGQPREPQVYTLPPSRDELTKNQVSLTCLVKGFYPSDIAVEWESNGQPENNYKTTPPVLDSDGSFFLYSKLTVDKSRWQQGNVFSCSVMHEALHNHYTQKSLSLSPGK

SEQ ID NO: 1179 - protein, 248 aa, Artificial
  Synthetic
CNVNHKPSNTKVDKKVEPKSCDKTHTCPPCPAPELLGGPSVFLFPPKPKDTLMISRTPEVTCVVVDVSHVDPEVKFNWYVDGVEVHNAKTKPREEQYNSTYRVVSVLTVLHQDWLNGKEYKCKVSNKALPAPIEKTISKAKGQPREPQVYTLPPSRDELTKNQVSLTCLVKGFYPSDIAVEWESNGQPENNYKTTPPVLDSDGSFFLYSKLTVDKSRWQQGNVFSCSVMHEALHNHYTQKSLSLSPGK

SEQ ID NO: 1180 - protein, 248 aa, Artificial
  Synthetic
CNVNHKPSNTKVDKKVEPKSCDKTHTCPPCPAPELLGGPSVFLFPPKPKDTLMISRTPEVTCVVVDVSHIDPEVKFNWYVDGVEVHNAKTKPREEQYNSTYRVVSVLTVLHQDWLNGKEYKCKVSNKALPAPIEKTISKAKGQPREPQVYTLPPSRDELTKNQVSLTCLVKGFYPSDIAVEWESNGQPENNYKTTPPVLDSDGSFFLYSKLTVDKSRWQQGNVFSCSVMHEALHNHYTQKSLSLSPGK

SEQ ID NO: 1181 - protein, 248 aa, Artificial
  Synthetic
CNVNHKPSNTKVDKKVEPKSCDKTHTCPPCPAPELLGGPSVFLFPPKPKDTLMISRTPEVTCVVVDVSHMDPEVKFNWYVDGVEVHNAKTKPREEQYNSTYRVVSVLTVLHQDWLNGKEYKCKVSNKALPAPIEKTISKAKGQPREPQVYTLPPSRDELTKNQVSLTCLVKGFYPSDIAVEWESNGQPENNYKTTPPVLDSDGSFFLYSKLTVDKSRWQQGNVFSCSVMHEALHNHYTQKSLSLSPGK

SEQ ID NO: 1182 - protein, 248 aa, Artificial
  Synthetic
CNVNHKPSNTKVDKKVEPKSCDKTHTCPPCPAPELLGGPSVFLFPPKPKDTLMISRTPEVTCVVVDVSHWDPEVKFNWYVDGVEVHNAKTKPREEQYNSTYRVVSVLTVLHQDWLNGKEYKCKVSNKALPAPIEKTISKAKGQPREPQVYTLPPSRDELTKNQVSLTCLVKGFYPSDIAVEWESNGQPENNYKTTPPVLDSDGSFFLYSKLTVDKSRWQQGNVFSCSVMHEALHNHYTQKSLSLSPGK

SEQ ID NO: 1183 - protein, 248 aa, Artificial
  Synthetic
CNVNHKPSNTKVDKKVEPKSCDKTHTCPPCPAPELLGGPSVFLFPPKPKDTLMISRTPEVTCVVVDVSHPDPEVKFNWYVDGVEVHNAKTKPREEQYNSTYRVVSVLTVLHQDWLNGKEYKCKVSNKALPAPIEKTISKAKGQPREPQVYTLPPSRDELTKNQVSLTCLVKGFYPSDIAVEWESNGQPENNYKTTPPVLDSDGSFFLYSKLTVDKSRWQQGNVFSCSVMHEALHNHYTQKSLSLSPGK

SEQ ID NO: 1184 - protein, 248 aa, Artificial
  Synthetic
CNVNHKPSNTKVDKKVEPKSCDKTHTCPPCPAPELLGGPSVFLFPPKPKDTLMISRTPEVTCVVVDVSHGDPEVKFNWYVDGVEVHNAKTKPREEQYNSTYRVVSVLTVLHQDWLNGKEYKCKVSNKALPAPIEKTISKAKGQPREPQVYTLPPSRDELTKNQVSLTCLVKGFYPSDIAVEWESNGQPENNYKTTPPVLDSDGSFFLYSKLTVDKSRWQQGNVFSCSVMHEALHNHYTQKSLSLSPGK

SEQ ID NO: 1185 - protein, 248 aa, Artificial
  Synthetic
CNVNHKPSNTKVDKKVEPKSCDKTHTCPPCPAPELLGGPSVFLFPPKPKDTLMISRTPEVTCVVVDVSHEDPEVKFNWYVDGVEVDNAKTKPREEQYNSTYRVVSVLTVLHQDWLNGKEYKCKVSNKALPAPIEKTISKAKGQPREPQVYTLPPSRDELTKNQVSLTCLVKGFYPSDIAVEWESNGQPENNYKTTPPVLDSDGSFFLYSKLTVDKSRWQQGNVFSCSVMHEALHNHYTQKSLSLSPGK

SEQ ID NO: 1186 - protein, 248 aa, Artificial
  Synthetic
CNVNHKPSNTKVDKKVEPKSCDKTHTCPPCPAPELLGGPSVFLFPPKPKDTLMISRTPEVTCVVVDVSHEDPEVKFNWYVDGVEVENAKTKPREEQYNSTYRVVSVLTVLHQDWLNGKEYKCKVSNKALPAPIEKTISKAKGQPREPQVYTLPPSRDELTKNQVSLTCLVKGFYPSDIAVEWESNGQPENNYKTTPPVLDSDGSFFLYSKLTVDKSRWQQGNVFSCSVMHEALHNHYTQKSLSLSPGK

SEQ ID NO: 1187 - protein, 248 aa, Artificial
  Synthetic
CNVNHKPSNTKVDKKVEPKSCDKTHTCPPCPAPELLGGPSVFLFPPKPKDTLMISRTPEVTCVVVDVSHEDPEVKFNWYVDGVEVQNAKTKPREEQYNSTYRVVSVLTVLHQDWLNGKEYKCKVSNKALPAPIEKTISKAKGQPREPQVYTLPPSRDELTKNQVSLTCLVKGFYPSDIAVEWESNGQPENNYKTTPPVLDSDGSFFLYSKLTVDKSRWQQGNVFSCSVMHEALHNHYTQKSLSLSPGK

SEQ ID NO: 1188 - protein, 248 aa, Artificial
  Synthetic
CNVNHKPSNTKVDKKVEPKSCDKTHTCPPCPAPELLGGPSVFLFPPKPKDTLMISRTPEVTCVVVDVSHEDPEVKFNWYVDGVEVKNAKTKPREEQYNSTYRVVSVLTVLHQDWLNGKEYKCKVSNKALPAPIEKTISKAKGQPREPQVYTLPPSRDELTKNQVSLTCLVKGFYPSDIAVEWESNGQPENNYKTTPPVLDSDGSFFLYSKLTVDKSRWQQGNVFSCSVMHEALHNHYTQKSLSLSPGK

SEQ ID NO: 1189 - protein, 248 aa, Artificial
  Synthetic
CNVNHKPSNTKVDKKVEPKSCDKTHTCPPCPAPELLGGPSVFLFPPKPKDTLMISRTPEVTCVVVDVSHEDPEVKFNWYVDGVEVYNAKTKPREEQYNSTYRVVSVLTVLHQDWLNGKEYKCKVSNKALPAPIEKTISKAKGQPREPQVYTLPPSRDELTKNQVSLTCLVKGFYPSDIAVEWESNGQPENNYKTTPPVLDSDGSFFLYSKLTVDKSRWQQGNVFSCSVMHEALHNHYTQKSLSLSPGK

SEQ ID NO: 1190 - protein, 248 aa, Artificial
  Synthetic
CNVNHKPSNTKVDKKVEPKSCDKTHTCPPCPAPELLGGPSVFLFPPKPKDTLMISRTPEVTCVVVDVSHEDPEVKFNWYVDGVEVWNAKTKPREEQYNSTYRVVSVLTVLHQDWLNGKEYKCKVSNKALPAPIEKTISKAKGQPREPQVYTLPPSRDELTKNQVSLTCLVKGFYPSDIAVEWESNGQPENNYKTTPPVLDSDGSFFLYSKLTVDKSRWQQGNVFSCSVMHEALHNHYTQKSLSLSPGK

SEQ ID NO: 1191 - protein, 248 aa, Artificial
  Synthetic
CNVNHKPSNTKVDKKVEPKSCDKTHTCPPCPAPELLGGPSVFLFPPKPKDTLMISRTPEVTCVVVDVSHEDPEVKFNWYVDGVEVHEAKTKPREEQYNSTYRVVSVLTVLHQDWLNGKEYKCKVSNKALPAPIEKTISKAKGQPREPQVYTLPPSRDELTKNQVSLTCLVKGFYPSDIAVEWESNGQPENNYKTTPPVLDSDGSFFLYSKLTVDKSRWQQGNVFSCSVMHEALHNHYTQKSLSLSPGK

SEQ ID NO: 1192 - protein, 248 aa, Artificial
  Synthetic
CNVNHKPSNTKVDKKVEPKSCDKTHTCPPCPAPELLGGPSVFLFPPKPKDTLMISRTPEVTCVVVDVSHEDPEVKFNWYVDGVEVHYAKTKPREEQYNSTYRVVSVLTVLHQDWLNGKEYKCKVSNKALPAPIEKTISKAKGQPREPQVYTLPPSRDELTKNQVSLTCLVKGFYPSDIAVEWESNGQPENNYKTTPPVLDSDGSFFLYSKLTVDKSRWQQGNVFSCSVMHEALHNHYTQKSLSLSPGK

SEQ ID NO: 1193 - protein, 248 aa, Artificial
  Synthetic
CNVNHKPSNTKVDKKVEPKSCDKTHTCPPCPAPELLGGPSVFLFPPKPKDTLMISRTPEVTCVVVDVSHEDPEVKFNWYVDGVEVHPAKTKPREEQYNSTYRVVSVLTVLHQDWLNGKEYKCKVSNKALPAPIEKTISKAKGQPREPQVYTLPPSRDELTKNQVSLTCLVKGFYPSDIAVEWESNGQPENNYKTTPPVLDSDGSFFLYSKLTVDKSRWQQGNVFSCSVMHEALHNHYTQKSLSLSPGK

SEQ ID NO: 1194 - protein, 248 aa, Artificial
  Synthetic
CNVNHKPSNTKVDKKVEPKSCDKTHTCPPCPAPELLGGPSVFLFPPKPKDTLMISRTPEVTCVVVDVSHEDPEVKFNWYVDGVEVHGAKTKPREEQYNSTYRVVSVLTVLHQDWLNGKEYKCKVSNKALPAPIEKTISKAKGQPREPQVYTLPPSRDELTKNQVSLTCLVKGFYPSDIAVEWESNGQPENNYKTTPPVLDSDGSFFLYSKLTVDKSRWQQGNVFSCSVMHEALHNHYTQKSLSLSPGK

SEQ ID NO: 1195 - protein, 248 aa, Artificial
  Synthetic
CNVNHKPSNTKVDKKVEPKSCDKTHTCPPCPAPELLGGPSVFLFPPKPKDTLMISRTPEVTCVVVDVSHEDPEVKFNWYVDGVEVHNADTKPREEQYNSTYRVVSVLTVLHQDWLNGKEYKCKVSNKALPAPIEKTISKAKGQPREPQVYTLPPSRDELTKNQVSLTCLVKGFYPSDIAVEWESNGQPENNYKTTPPVLDSDGSFFLYSKLTVDKSRWQQGNVFSCSVMHEALHNHYTQKSLSLSPGK

SEQ ID NO: 1196 - protein, 248 aa, Artificial
  Synthetic
CNVNHKPSNTKVDKKVEPKSCDKTHTCPPCPAPELLGGPSVFLFPPKPKDTLMISRTPEVTCVVVDVSHEDPEVKFNWYVDGVEVHNAETKPREEQYNSTYRVVSVLTVLHQDWLNGKEYKCKVSNKALPAPIEKTISKAKGQPREPQVYTLPPSRDELTKNQVSLTCLVKGFYPSDIAVEWESNGQPENNYKTTPPVLDSDGSFFLYSKLTVDKSRWQQGNVFSCSVMHEALHNHYTQKSLSLSPGK

SEQ ID NO: 1197 - protein, 248 aa, Artificial
  Synthetic
CNVNHKPSNTKVDKKVEPKSCDKTHTCPPCPAPELLGGPSVFLFPPKPKDTLMISRTPEVTCVVVDVSHEDPEVKFNWYVDGVEVHNAYTKPREEQYNSTYRVVSVLTVLHQDWLNGKEYKCKVSNKALPAPIEKTISKAKGQPREPQVYTLPPSRDELTKNQVSLTCLVKGFYPSDIAVEWESNGQPENNYKTTPPVLDSDGSFFLYSKLTVDKSRWQQGNVFSCSVMHEALHNHYTQKSLSLSPGK

SEQ ID NO: 1198 - protein, 248 aa, Artificial
  Synthetic
CNVNHKPSNTKVDKKVEPKSCDKTHTCPPCPAPELLGGPSVFLFPPKPKDTLMISRTPEVTCVVVDVSHEDPEVKFNWYVDGVEVHNAKTKPDEEQYNSTYRVVSVLTVLHQDWLNGKEYKCKVSNKALPAPIEKTISKAKGQPREPQVYTLPPSRDELTKNQVSLTCLVKGFYPSDIAVEWESNGQPENNYKTTPPVLDSDGSFFLYSKLTVDKSRWQQGNVFSCSVMHEALHNHYTQKSLSLSPGK

SEQ ID NO: 1199 - protein, 248 aa, Artificial
  Synthetic
CNVNHKPSNTKVDKKVEPKSCDKTHTCPPCPAPELLGGPSVFLFPPKPKDTLMISRTPEVTCVVVDVSHEDPEVKFNWYVDGVEVHNAKTKPEEEQYNSTYRVVSVLTVLHQDWLNGKEYKCKVSNKALPAPIEKTISKAKGQPREPQVYTLPPSRDELTKNQVSLTCLVKGFYPSDIAVEWESNGQPENNYKTTPPVLDSDGSFFLYSKLTVDKSRWQQGNVFSCSVMHEALHNHYTQKSLSLSPGK

SEQ ID NO: 1200 - protein, 248 aa, Artificial
  Synthetic
CNVNHKPSNTKVDKKVEPKSCDKTHTCPPCPAPELLGGPSVFLFPPKPKDTLMISRTPEVTCVVVDVSHEDPEVKFNWYVDGVEVHNAKTKPTEEQYNSTYRVVSVLTVLHQDWLNGKEYKCKVSNKALPAPIEKTISKAKGQPREPQVYTLPPSRDELTKNQVSLTCLVKGFYPSDIAVEWESNGQPENNYKTTPPVLDSDGSFFLYSKLTVDKSRWQQGNVFSCSVMHEALHNHYTQKSLSLSPGK

SEQ ID NO: 1201 - protein, 248 aa, Artificial
  Synthetic
CNVNHKPSNTKVDKKVEPKSCDKTHTCPPCPAPELLGGPSVFLFPPKPKDTLMISRTPEVTCVVVDVSHEDPEVKFNWYVDGVEVHNAKTKPYEEQYNSTYRVVSVLTVLHQDWLNGKEYKCKVSNKALPAPIEKTISKAKGQPREPQVYTLPPSRDELTKNQVSLTCLVKGFYPSDIAVEWESNGQPENNYKTTPPVLDSDGSFFLYSKLTVDKSRWQQGNVFSCSVMHEALHNHYTQKSLSLSPGK

SEQ ID NO: 1202 - protein, 248 aa, Artificial
  Synthetic
CNVNHKPSNTKVDKKVEPKSCDKTHTCPPCPAPELLGGPSVFLFPPKPKDTLMISRTPEVTCVVVDVSHEDPEVKFNWYVDGVEVHNAKTKPREEQYNSTYRVVSVLTVLHQDWLNGKEYKCKVSNKALPAPIEKNISKAKGQPREPQVYTLPPSRDELTKNQVSLTCLVKGFYPSDIAVEWESNGQPENNYKTTPPVLDSDGSFFLYSKLTVDKSRWQQGNVFSCSVMHEALHNHYTQKSLSLSPGK

SEQ ID NO: 1203 - protein, 248 aa, Artificial
  Synthetic
CNVNHKPSNTKVDKKVEPKSCDKTHTCPPCPAPELLGGPSVFLFPPKPKDTLMISRTPEVTCVVVDVSHEDPEVKFNWYVDGVEVHNAKTKPREEQYNSTYRVVSVLTVLHQDWLNGKEYKCKVSNKALPAPIEKSISKAKGQPREPQVYTLPPSRDELTKNQVSLTCLVKGFYPSDIAVEWESNGQPENNYKTTPPVLDSDGSFFLYSKLTVDKSRWQQGNVFSCSVMHEALHNHYTQKSLSLSPGK

SEQ ID NO: 1204 - protein, 248 aa, Artificial
  Synthetic
CNVNHKPSNTKVDKKVEPKSCDKTHTCPPCPAPELLGGPSVFLFPPKPKDTLMISRTPEVTCVVVDVSHEDPEVKFNWYVDGVEVHNAKTKPREEQYNSTYRVVSVLTVLHQDWLNGKEYKCKVSNKALPAPIEKHISKAKGQPREPQVYTLPPSRDELTKNQVSLTCLVKGFYPSDIAVEWESNGQPENNYKTTPPVLDSDGSFFLYSKLTVDKSRWQQGNVFSCSVMHEALHNHYTQKSLSLSPGK

SEQ ID NO: 1205 - protein, 248 aa, Artificial
  Synthetic
CNVNHKPSNTKVDKKVEPKSCDKTHTCPPCPAPELLGGPSVFLFPPKPKDTLMISRTPEVTCVVVDVSHEDPEVKFNWYVDGVEVHNAKTKPREEQYNSTYRVVSVLTVLHQDWLNGKEYKCKVSNKALPAPIEKVISKAKGQPREPQVYTLPPSRDELTKNQVSLTCLVKGFYPSDIAVEWESNGQPENNYKTTPPVLDSDGSFFLYSKLTVDKSRWQQGNVFSCSVMHEALHNHYTQKSLSLSPGK

SEQ ID NO: 1206 - protein, 248 aa, Artificial
  Synthetic
CNVNHKPSNTKVDKKVEPKSCDKTHTCPPCPAPELLGGPSVFLFPPKPKDTLMISRTPEVTCVVVDVSHEDPEVKFNWYVDGVEVHNAKTKPREEQYNSTYRVVSVLTVLHQDWLNGKEYKCKVSNKALPAPIEKLISKAKGQPREPQVYTLPPSRDELTKNQVSLTCLVKGFYPSDIAVEWESNGQPENNYKTTPPVLDSDGSFFLYSKLTVDKSRWQQGNVFSCSVMHEALHNHYTQKSLSLSPGK

SEQ ID NO: 1207 - protein, 248 aa, Artificial
  Synthetic
CNVNHKPSNTKVDKKVEPKSCDKTHTCPPCPAPELLGGPSVFLFPPKPKDTLMISRTPEVTCVVVDVSHEDPEVKFNWYVDGVEVHNAKTKPREEQYNSTYRVVSVLTVLHQDWLNGKEYKCKVSNKALPAPIEKIISKAKGQPREPQVYTLPPSRDELTKNQVSLTCLVKGFYPSDIAVEWESNGQPENNYKTTPPVLDSDGSFFLYSKLTVDKSRWQQGNVFSCSVMHEALHNHYTQKSLSLSPGK

SEQ ID NO: 1208 - protein, 248 aa, Artificial
  Synthetic
CNVNHKPSNTKVDKKVEPKSCDKTHTCPPCPAPELLGGPSVFLFPPKPKDTLMISRTPEVTCVVVDVSHEDPEVKFNWYVDGVEVHNAKTKPREEQYNSTYRVVSVLTVLHQDWLNGKEYKCKVSNKALPAPIEKFISKAKGQPREPQVYTLPPSRDELTKNQVSLTCLVKGFYPSDIAVEWESNGQPENNYKTTPPVLDSDGSFFLYSKLTVDKSRWQQGNVFSCSVMHEALHNHYTQKSLSLSPGK

SEQ ID NO: 1209 - protein, 248 aa, Artificial
  Synthetic
CNVNHKPSNTKVDKKVEPKSCDKTHTCPPCPAPELLGGPSVFLFPPKPKDTLMISRTPEVTCVVVDVSHEDPEVKFNWYVDGVEVHNAKTKPREEQYNSTYRVVSVLTVLHQDWLNGKEYKCKVSNKALPAPIEKMISKAKGQPREPQVYTLPPSRDELTKNQVSLTCLVKGFYPSDIAVEWESNGQPENNYKTTPPVLDSDGSFFLYSKLTVDKSRWQQGNVFSCSVMHEALHNHYTQKSLSLSPGK

SEQ ID NO: 1210 - protein, 248 aa, Artificial
  Synthetic
CNVNHKPSNTKVDKKVEPKSCDKTHTCPPCPAPELLGGPSVFLFPPKPKDTLMISRTPEVTCVVVDVSHEDPEVKFNWYVDGVEVHNAKTKPREEQYNSTYRVVSVLTVLHQDWLNGKEYKCKVSNKALPAPIEKWISKAKGQPREPQVYTLPPSRDELTKNQVSLTCLVKGFYPSDIAVEWESNGQPENNYKTTPPVLDSDGSFFLYSKLTVDKSRWQQGNVFSCSVMHEALHNHYTQKSLSLSPGK

SEQ ID NO: 1211 - protein, 248 aa, Artificial
  Synthetic
CNVNHKPSNTKVDKKVEPKSCDKTHTCPPCPAPELLGGPSVFLFPPKPKDTLMISRTPEVTCVVVDVSHEDPEVKFNWYVDGVEVHNAKTKPREEQYNSTYRVVSVLTVLHQDWLNGKEYKCKVSNKALPAPIEKPISKAKGQPREPQVYTLPPSRDELTKNQVSLTCLVKGFYPSDIAVEWESNGQPENNYKTTPPVLDSDGSFFLYSKLTVDKSRWQQGNVFSCSVMHEALHNHYTQKSLSLSPGK

SEQ ID NO: 1212 - protein, 248 aa, Artificial
  Synthetic
CNVNHKPSNTKVDKKVEPKSCDKTHTCPPCPAPELLGGPSVFLFPPKPKDTLMISRTPEVTCVVVDVSHEDPEVKFNWYVDGVEVHNAKTKPREEQYNSTYRVVSVLTVLHQDWLNGKEYKCKVSNKALPAPIEKGISKAKGQPREPQVYTLPPSRDELTKNQVSLTCLVKGFYPSDIAVEWESNGQPENNYKTTPPVLDSDGSFFLYSKLTVDKSRWQQGNVFSCSVMHEALHNHYTQKSLSLSPGK

SEQ ID NO: 1213 - protein, 248 aa, Artificial
  Synthetic
CNVNHKPSNTKVDKKVEPKSCKKTHTCPPCPAPELLGGPSVFLFPPKPKDTLMISRTPEVTCVVVDVSHEDPEVKFNWYVDGVEVHNAKTKPREEQYNSTYRVVSVLTVLHQDWLNGKEYKCKVSNKALPAPIEKTISKAKGQPREPQVYTLPPSRDELTKNQVSLTCLVKGFYPSDIAVEWESNGQPENNYKTTPPVLDSDGSFFLYSKLTVDKSRWQQGNVFSCSVMHEALHNHYTQKSLSLSPGK

SEQ ID NO: 1214 - protein, 248 aa, Artificial
  Synthetic
CNVNHKPSNTKVDKKVEPKSCYKTHTCPPCPAPELLGGPSVFLFPPKPKDTLMISRTPEVTCVVVDVSHEDPEVKFNWYVDGVEVHNAKTKPREEQYNSTYRVVSVLTVLHQDWLNGKEYKCKVSNKALPAPIEKTISKAKGQPREPQVYTLPPSRDELTKNQVSLTCLVKGFYPSDIAVEWESNGQPENNYKTTPPVLDSDGSFFLYSKLTVDKSRWQQGNVFSCSVMHEALHNHYTQKSLSLSPGK

SEQ ID NO: 1215 - protein, 248 aa, Artificial
  Synthetic
CNVNHKPSNTKVDKKVEPKSCDKEHTCPPCPAPELLGGPSVFLFPPKPKDTLMISRTPEVTCVVVDVSHEDPEVKFNWYVDGVEVHNAKTKPREEQYNSTYRVVSVLTVLHQDWLNGKEYKCKVSNKALPAPIEKTISKAKGQPREPQVYTLPPSRDELTKNQVSLTCLVKGFYPSDIAVEWESNGQPENNYKTTPPVLDSDGSFFLYSKLTVDKSRWQQGNVFSCSVMHEALHNHYTQKSLSLSPGK

SEQ ID NO: 1216 - protein, 248 aa, Artificial
  Synthetic
CNVNHKPSNTKVDKKVEPKSCDKKHTCPPCPAPELLGGPSVFLFPPKPKDTLMISRTPEVTCVVVDVSHEDPEVKFNWYVDGVEVHNAKTKPREEQYNSTYRVVSVLTVLHQDWLNGKEYKCKVSNKALPAPIEKTISKAKGQPREPQVYTLPPSRDELTKNQVSLTCLVKGFYPSDIAVEWESNGQPENNYKTTPPVLDSDGSFFLYSKLTVDKSRWQQGNVFSCSVMHEALHNHYTQKSLSLSPGK

SEQ ID NO: 1217 - protein, 248 aa, Artificial
  Synthetic
CNVNHKPSNTKVDKKVEPKSCDKTETCPPCPAPELLGGPSVFLFPPKPKDTLMISRTPEVTCVVVDVSHEDPEVKFNWYVDGVEVHNAKTKPREEQYNSTYRVVSVLTVLHQDWLNGKEYKCKVSNKALPAPIEKTISKAKGQPREPQVYTLPPSRDELTKNQVSLTCLVKGFYPSDIAVEWESNGQPENNYKTTPPVLDSDGSFFLYSKLTVDKSRWQQGNVFSCSVMHEALHNHYTQKSLSLSPGK

SEQ ID NO: 1218 - protein, 248 aa, Artificial
  Synthetic
CNVNHKPSNTKVDKKVEPKSCDKTYTCPPCPAPELLGGPSVFLFPPKPKDTLMISRTPEVTCVVVDVSHEDPEVKFNWYVDGVEVHNAKTKPREEQYNSTYRVVSVLTVLHQDWLNGKEYKCKVSNKALPAPIEKTISKAKGQPREPQVYTLPPSRDELTKNQVSLTCLVKGFYPSDIAVEWESNGQPENNYKTTPPVLDSDGSFFLYSKLTVDKSRWQQGNVFSCSVMHEALHNHYTQKSLSLSPGK

SEQ ID NO: 1219 - protein, 248 aa, Artificial
  Synthetic
CNVNHKPSNTKVDKKVEPKSCDKTHECPPCPAPELLGGPSVFLFPPKPKDTLMISRTPEVTCVVVDVSHEDPEVKFNWYVDGVEVHNAKTKPREEQYNSTYRVVSVLTVLHQDWLNGKEYKCKVSNKALPAPIEKTISKAKGQPREPQVYTLPPSRDELTKNQVSLTCLVKGFYPSDIAVEWESNGQPENNYKTTPPVLDSDGSFFLYSKLTVDKSRWQQGNVFSCSVMHEALHNHYTQKSLSLSPGK

SEQ ID NO: 1220 - protein, 248 aa, Artificial
  Synthetic
CNVNHKPSNTKVDKKVEPKSCDKTHKCPPCPAPELLGGPSVFLFPPKPKDTLMISRTPEVTCVVVDVSHEDPEVKFNWYVDGVEVHNAKTKPREEQYNSTYRVVSVLTVLHQDWLNGKEYKCKVSNKALPAPIEKTISKAKGQPREPQVYTLPPSRDELTKNQVSLTCLVKGFYPSDIAVEWESNGQPENNYKTTPPVLDSDGSFFLYSKLTVDKSRWQQGNVFSCSVMHEALHNHYTQKSLSLSPGK

SEQ ID NO: 1221 - protein, 248 aa, Artificial
  Synthetic
CNVNHKPSNTKVDKKVEPKSCDKTHWCPPCPAPELLGGPSVFLFPPKPKDTLMISRTPEVTCVVVDVSHEDPEVKFNWYVDGVEVHNAKTKPREEQYNSTYRVVSVLTVLHQDWLNGKEYKCKVSNKALPAPIEKTISKAKGQPREPQVYTLPPSRDELTKNQVSLTCLVKGFYPSDIAVEWESNGQPENNYKTTPPVLDSDGSFFLYSKLTVDKSRWQQGNVFSCSVMHEALHNHYTQKSLSLSPGK

SEQ ID NO: 1222 - protein, 248 aa, Artificial
  Synthetic
CNVNHKPSNTKVDKKVEPKSCDKTHTCPPCPAPELLGGPSVFLFPPDPKDTLMISRTPEVTCVVVDVSHEDPEVKFNWYVDGVEVHNAKTKPREEQYNSTYRVVSVLTVLHQDWLNGKEYKCKVSNKALPAPIEKTISKAKGQPREPQVYTLPPSRDELTKNQVSLTCLVKGFYPSDIAVEWESNGQPENNYKTTPPVLDSDGSFFLYSKLTVDKSRWQQGNVFSCSVMHEALHNHYTQKSLSLSPGK

SEQ ID NO: 1223 - protein, 248 aa, Artificial
  Synthetic
CNVNHKPSNTKVDKKVEPKSCDKTHTCPPCPAPELLGGPSVFLFPPEPKDTLMISRTPEVTCVVVDVSHEDPEVKFNWYVDGVEVHNAKTKPREEQYNSTYRVVSVLTVLHQDWLNGKEYKCKVSNKALPAPIEKTISKAKGQPREPQVYTLPPSRDELTKNQVSLTCLVKGFYPSDIAVEWESNGQPENNYKTTPPVLDSDGSFFLYSKLTVDKSRWQQGNVFSCSVMHEALHNHYTQKSLSLSPGK

SEQ ID NO: 1224 - protein, 248 aa, Artificial
  Synthetic
CNVNHKPSNTKVDKKVEPKSCDKTHTCPPCPAPELLGGPSVFLFPPHPKDTLMISRTPEVTCVVVDVSHEDPEVKFNWYVDGVEVHNAKTKPREEQYNSTYRVVSVLTVLHQDWLNGKEYKCKVSNKALPAPIEKTISKAKGQPREPQVYTLPPSRDELTKNQVSLTCLVKGFYPSDIAVEWESNGQPENNYKTTPPVLDSDGSFFLYSKLTVDKSRWQQGNVFSCSVMHEALHNHYTQKSLSLSPGK

SEQ ID NO: 1225 - protein, 248 aa, Artificial
  Synthetic
CNVNHKPSNTKVDKKVEPKSCDKTHTCPPCPAPELLGGPSVFLFPPYPKDTLMISRTPEVTCVVVDVSHEDPEVKFNWYVDGVEVHNAKTKPREEQYNSTYRVVSVLTVLHQDWLNGKEYKCKVSNKALPAPIEKTISKAKGQPREPQVYTLPPSRDELTKNQVSLTCLVKGFYPSDIAVEWESNGQPENNYKTTPPVLDSDGSFFLYSKLTVDKSRWQQGNVFSCSVMHEALHNHYTQKSLSLSPGK

SEQ ID NO: 1226 - protein, 248 aa, Artificial
  Synthetic
CNVNHKPSNTKVDKKVEPKSCDKTHTCPPCPAPELLGGPSVFLFPPKPKQTLMISRTPEVTCVVVDVSHEDPEVKFNWYVDGVEVHNAKTKPREEQYNSTYRVVSVLTVLHQDWLNGKEYKCKVSNKALPAPIEKTISKAKGQPREPQVYTLPPSRDELTKNQVSLTCLVKGFYPSDIAVEWESNGQPENNYKTTPPVLDSDGSFFLYSKLTVDKSRWQQGNVFSCSVMHEALHNHYTQKSLSLSPGK

SEQ ID NO: 1227 - protein, 248 aa, Artificial
  Synthetic
CNVNHKPSNTKVDKKVEPKSCDKTHTCPPCPAPELLGGPSVFLFPPKPKHTLMISRTPEVTCVVVDVSHEDPEVKFNWYVDGVEVHNAKTKPREEQYNSTYRVVSVLTVLHQDWLNGKEYKCKVSNKALPAPIEKTISKAKGQPREPQVYTLPPSRDELTKNQVSLTCLVKGFYPSDIAVEWESNGQPENNYKTTPPVLDSDGSFFLYSKLTVDKSRWQQGNVFSCSVMHEALHNHYTQKSLSLSPGK

SEQ ID NO: 1228 - protein, 248 aa, Artificial
  Synthetic
CNVNHKPSNTKVDKKVEPKSCDKTHTCPPCPAPELLGGPSVFLFPPKPKYTLMISRTPEVTCVVVDVSHEDPEVKFNWYVDGVEVHNAKTKPREEQYNSTYRVVSVLTVLHQDWLNGKEYKCKVSNKALPAPIEKTISKAKGQPREPQVYTLPPSRDELTKNQVSLTCLVKGFYPSDIAVEWESNGQPENNYKTTPPVLDSDGSFFLYSKLTVDKSRWQQGNVFSCSVMHEALHNHYTQKSLSLSPGK

SEQ ID NO: 1229 - protein, 248 aa, Artificial
  Synthetic
CNVNHKPSNTKVDKKVEPKSCDKTHTCPPCPAPELLGGPSVFLFPPKPKDTLMISETPEVTCVVVDVSHEDPEVKFNWYVDGVEVHNAKTKPREEQYNSTYRVVSVLTVLHQDWLNGKEYKCKVSNKALPAPIEKTISKAKGQPREPQVYTLPPSRDELTKNQVSLTCLVKGFYPSDIAVEWESNGQPENNYKTTPPVLDSDGSFFLYSKLTVDKSRWQQGNVFSCSVMHEALHNHYTQKSLSLSPGK

SEQ ID NO: 1230 - protein, 248 aa, Artificial
  Synthetic
CNVNHKPSNTKVDKKVEPKSCDKTHTCPPCPAPELLGGPSVFLFPPKPKDTLMISYTPEVTCVVVDVSHEDPEVKFNWYVDGVEVHNAKTKPREEQYNSTYRVVSVLTVLHQDWLNGKEYKCKVSNKALPAPIEKTISKAKGQPREPQVYTLPPSRDELTKNQVSLTCLVKGFYPSDIAVEWESNGQPENNYKTTPPVLDSDGSFFLYSKLTVDKSRWQQGNVFSCSVMHEALHNHYTQKSLSLSPGK

SEQ ID NO: 1231 - protein, 248 aa, Artificial
  Synthetic
CNVNHKPSNTKVDKKVEPKSCDKTHTCPPCPAPELLGGPSVFLFPPKPKDTLMISRTPSVTCVVVDVSHEDPEVKFNWYVDGVEVHNAKTKPREEQYNSTYRVVSVLTVLHQDWLNGKEYKCKVSNKALPAPIEKTISKAKGQPREPQVYTLPPSRDELTKNQVSLTCLVKGFYPSDIAVEWESNGQPENNYKTTPPVLDSDGSFFLYSKLTVDKSRWQQGNVFSCSVMHEALHNHYTQKSLSLSPGK

SEQ ID NO: 1232 - protein, 248 aa, Artificial
  Synthetic
CNVNHKPSNTKVDKKVEPKSCDKTHTCPPCPAPELLGGPSVFLFPPKPKDTLMISRTPHVTCVVVDVSHEDPEVKFNWYVDGVEVHNAKTKPREEQYNSTYRVVSVLTVLHQDWLNGKEYKCKVSNKALPAPIEKTISKAKGQPREPQVYTLPPSRDELTKNQVSLTCLVKGFYPSDIAVEWESNGQPENNYKTTPPVLDSDGSFFLYSKLTVDKSRWQQGNVFSCSVMHEALHNHYTQKSLSLSPGK

SEQ ID NO: 1233 - protein, 247 aa, Artificial
  Synthetic
CNVNHKPSNTKVDKKVEPKSCDKTHTCPPCPAPELLGGPSVFLFPPKPKDTLMISRTPYVTCVVVDVSHEDPEVKFNWYVDGVEVHNAKTKPREEQYNSTYRVVSVLTVLHQDWLNGKEYKCKVSNKALPAPIEKTISKAKGQPREPQVYTLPPSRDELTKNQVSLTCLVKGFYPSDIAVEWESNGQPENNYKTTPPVLDSDGSFFLYSKLTVDKSRWQQGNVFSCSVMHEALHNHYQKSLSLSPGK

SEQ ID NO: 1234 - protein, 248 aa, Artificial
  Synthetic
CNVNHKPSNTKVDKKVEPKSCDKTHTCPPCPAPELLGGPSVFLFPPKPKDTLMISRTPEVDCVVVDVSHEDPEVKFNWYVDGVEVHNAKTKPREEQYNSTYRVVSVLTVLHQDWLNGKEYKCKVSNKALPAPIEKTISKAKGQPREPQVYTLPPSRDELTKNQVSLTCLVKGFYPSDIAVEWESNGQPENNYKTTPPVLDSDGSFFLYSKLTVDKSRWQQGNVFSCSVMHEALHNHYTQKSLSLSPGK

SEQ ID NO: 1235 - protein, 248 aa, Artificial
  Synthetic
CNVNHKPSNTKVDKKVEPKSCDKTHTCPPCPAPELLGGPSVFLFPPKPKDTLMISRTPEVECVVVDVSHEDPEVKFNWYVDGVEVHNAKTKPREEQYNSTYRVVSVLTVLHQDWLNGKEYKCKVSNKALPAPIEKTISKAKGQPREPQVYTLPPSRDELTKNQVSLTCLVKGFYPSDIAVEWESNGQPENNYKTTPPVLDSDGSFFLYSKLTVDKSRWQQGNVFSCSVMHEALHNHYTQKSLSLSPGK

SEQ ID NO: 1236 - protein, 248 aa, Artificial
  Synthetic
CNVNHKPSNTKVDKKVEPKSCDKTHTCPPCPAPELLGGPSVFLFPPKPKDTLMISRTPEVHCVVVDVSHEDPEVKFNWYVDGVEVHNAKTKPREEQYNSTYRVVSVLTVLHQDWLNGKEYKCKVSNKALPAPIEKTISKAKGQPREPQVYTLPPSRDELTKNQVSLTCLVKGFYPSDIAVEWESNGQPENNYKTTPPVLDSDGSFFLYSKLTVDKSRWQQGNVFSCSVMHEALHNHYTQKSLSLSPGK

SEQ ID NO: 1237 - protein, 248 aa, Artificial
  Synthetic
CNVNHKPSNTKVDKKVEPKSCDKTHTCPPCPAPELLGGPSVFLFPPKPKDTLMISRTPEVYCVVVDVSHEDPEVKFNWYVDGVEVHNAKTKPREEQYNSTYRVVSVLTVLHQDWLNGKEYKCKVSNKALPAPIEKTISKAKGQPREPQVYTLPPSRDELTKNQVSLTCLVKGFYPSDIAVEWESNGQPENNYKTTPPVLDSDGSFFLYSKLTVDKSRWQQGNVFSCSVMHEALHNHYTQKSLSLSPGK

SEQ ID NO: 1238 - protein, 248 aa, Artificial
  Synthetic
CNVNHKPSNTKVDKKVEPKSCDKTHTCPPCPAPELLGGPSVFLFPPKPKDTLMISRTPEVTCEVVDVSHEDPEVKFNWYVDGVEVHNAKTKPREEQYNSTYRVVSVLTVLHQDWLNGKEYKCKVSNKALPAPIEKTISKAKGQPREPQVYTLPPSRDELTKNQVSLTCLVKGFYPSDIAVEWESNGQPENNYKTTPPVLDSDGSFFLYSKLTVDKSRWQQGNVFSCSVMHEALHNHYTQKSLSLSPGK

SEQ ID NO: 1239 - protein, 248 aa, Artificial
  Synthetic
CNVNHKPSNTKVDKKVEPKSCDKTHTCPPCPAPELLGGPSVFLFPPKPKDTLMISRTPEVTCFVVDVSHEDPEVKFNWYVDGVEVHNAKTKPREEQYNSTYRVVSVLTVLHQDWLNGKEYKCKVSNKALPAPIEKTISKAKGQPREPQVYTLPPSRDELTKNQVSLTCLVKGFYPSDIAVEWESNGQPENNYKTTPPVLDSDGSFFLYSKLTVDKSRWQQGNVFSCSVMHEALHNHYTQKSLSLSPGK

SEQ ID NO: 1240 - protein, 248 aa, Artificial
  Synthetic
CNVNHKPSNTKVDKKVEPKSCDKTHTCPPCPAPELLGGPSVFLFPPKPKDTLMISRTPEVTCVVVDVSHEDPEVKLNWYVDGVEVHNAKTKPREEQYNSTYRVVSVLTVLHQDWLNGKEYKCKVSNKALPAPIEKTISKAKGQPREPQVYTLPPSRDELTKNQVSLTCLVKGFYPSDIAVEWESNGQPENNYKTTPPVLDSDGSFFLYSKLTVDKSRWQQGNVFSCSVMHEALHNHYTQKSLSLSPGK

SEQ ID NO: 1241 - protein, 248 aa, Artificial
  Synthetic
CNVNHKPSNTKVDKKVEPKSCDKTHTCPPCPAPELLGGPSVFLFPPKPKDTLMISRTPEVTCVVVDVSHEDPEVKFNWYVDDVEVHNAKTKPREEQYNSTYRVVSVLTVLHQDWLNGKEYKCKVSNKALPAPIEKTISKAKGQPREPQVYTLPPSRDELTKNQVSLTCLVKGFYPSDIAVEWESNGQPENNYKTTPPVLDSDGSFFLYSKLTVDKSRWQQGNVFSCSVMHEALHNHYTQKSLSLSPGK

SEQ ID NO: 1242 - protein, 248 aa, Artificial
  Synthetic
CNVNHKPSNTKVDKKVEPKSCDKTHTCPPCPAPELLGGPSVFLFPPKPKDTLMISRTPEVTCVVVDVSHEDPEVKFNWYVDKVEVHNAKTKPREEQYNSTYRVVSVLTVLHQDWLNGKEYKCKVSNKALPAPIEKTISKAKGQPREPQVYTLPPSRDELTKNQVSLTCLVKGFYPSDIAVEWESNGQPENNYKTTPPVLDSDGSFFLYSKLTVDKSRWQQGNVFSCSVMHEALHNHYTQKSLSLSPGK

SEQ ID NO: 1243 - protein, 248 aa, Artificial
  Synthetic
CNVNHKPSNTKVDKKVEPKSCDKTHTCPPCPAPELLGGPSVFLFPPKPKDTLMISRTPEVTCVVVDVSHEDPEVKFNWYVDYVEVHNAKTKPREEQYNSTYRVVSVLTVLHQDWLNGKEYKCKVSNKALPAPIEKTISKAKGQPREPQVYTLPPSRDELTKNQVSLTCLVKGFYPSDIAVEWESNGQPENNYKTTPPVLDSDGSFFLYSKLTVDKSRWQQGNVFSCSVMHEALHNHYTQKSLSLSPGK

SEQ ID NO: 1244 - protein, 248 aa, Artificial
  Synthetic
CNVNHKPSNTKVDKKVEPKSCDKTHTCPPCPAPELLGGPSVFLFPPKPKDTLMISRTPEVTCVVVDVSHEDPEVKFNWYVDPVEVHNAKTKPREEQYNSTYRVVSVLTVLHQDWLNGKEYKCKVSNKALPAPIEKTISKAKGQPREPQVYTLPPSRDELTKNQVSLTCLVKGFYPSDIAVEWESNGQPENNYKTTPPVLDSDGSFFLYSKLTVDKSRWQQGNVFSCSVMHEALHNHYTQKSLSLSPGK

SEQ ID NO: 1245 - protein, 248 aa, Artificial
  Synthetic
CNVNHKPSNTKVDKKVEPKSCDKTHTCPPCPAPELLGGPSVFLFPPKPKDTLMISRTPEVTCVVVDVSHEDPEVKFNWYVDGEEVHNAKTKPREEQYNSTYRVVSVLTVLHQDWLNGKEYKCKVSNKALPAPIEKTISKAKGQPREPQVYTLPPSRDELTKNQVSLTCLVKGFYPSDIAVEWESNGQPENNYKTTPPVLDSDGSFFLYSKLTVDKSRWQQGNVFSCSVMHEALHNHYTQKSLSLSPGK

SEQ ID NO: 1246 - protein, 248 aa, Artificial
  Synthetic
CNVNHKPSNTKVDKKVEPKSCDKTHTCPPCPAPELLGGPSVFLFPPKPKDTLMISRTPEVTCVVVDVSHEDPEVKFNWYVDGKEVHNAKTKPREEQYNSTYRVVSVLTVLHQDWLNGKEYKCKVSNKALPAPIEKTISKAKGQPREPQVYTLPPSRDELTKNQVSLTCLVKGFYPSDIAVEWESNGQPENNYKTTPPVLDSDGSFFLYSKLTVDKSRWQQGNVFSCSVMHEALHNHYTQKSLSLSPGK

SEQ ID NO: 1247 - protein, 248 aa, Artificial
  Synthetic
CNVNHKPSNTKVDKKVEPKSCDKTHTCPPCPAPELLGGPSVFLFPPKPKDTLMISRTPEVTCVVVDVSHEDPEVKFNWYVDGYEVHNAKTKPREEQYNSTYRVVSVLTVLHQDWLNGKEYKCKVSNKALPAPIEKTISKAKGQPREPQVYTLPPSRDELTKNQVSLTCLVKGFYPSDIAVEWESNGQPENNYKTTPPVLDSDGSFFLYSKLTVDKSRWQQGNVFSCSVMHEALHNHYTQKSLSLSPGK

SEQ ID NO: 1248 - protein, 248 aa, Artificial
  Synthetic
CNVNHKPSNTKVDKKVEPKSCDKTHTCPPCPAPELLGGPSVFLFPPKPKDTLMISRTPEVTCVVVDVSHEDPEVKFNWYVDGPEVHNAKTKPREEQYNSTYRVVSVLTVLHQDWLNGKEYKCKVSNKALPAPIEKTISKAKGQPREPQVYTLPPSRDELTKNQVSLTCLVKGFYPSDIAVEWESNGQPENNYKTTPPVLDSDGSFFLYSKLTVDKSRWQQGNVFSCSVMHEALHNHYTQKSLSLSPGK

SEQ ID NO: 1249 - protein, 248 aa, Artificial
  Synthetic
CNVNHKPSNTKVDKKVEPKSCDKTHTCPPCPAPELLGGPSVFLFPPKPKDTLMISRTPEVTCVVVDVSHEDPEVKFNWYVDGGEVHNAKTKPREEQYNSTYRVVSVLTVLHQDWLNGKEYKCKVSNKALPAPIEKTISKAKGQPREPQVYTLPPSRDELTKNQVSLTCLVKGFYPSDIAVEWESNGQPENNYKTTPPVLDSDGSFFLYSKLTVDKSRWQQGNVFSCSVMHEALHNHYTQKSLSLSPGK

SEQ ID NO: 1250 - protein, 248 aa, Artificial
  Synthetic
CNVNHKPSNTKVDKKVEPKSCDKTHTCPPCPAPELLGGPSVFLFPPKPKDTLMISRTPEVTCVVVDVSHEDPEVKFNWYVDGVKVHNAKTKPREEQYNSTYRVVSVLTVLHQDWLNGKEYKCKVSNKALPAPIEKTISKAKGQPREPQVYTLPPSRDELTKNQVSLTCLVKGFYPSDIAVEWESNGQPENNYKTTPPVLDSDGSFFLYSKLTVDKSRWQQGNVFSCSVMHEALHNHYTQKSLSLSPGK

SEQ ID NO: 1251 - protein, 248 aa, Artificial
  Synthetic
CNVNHKPSNTKVDKKVEPKSCDKTHTCPPCPAPELLGGPSVFLFPPKPKDTLMISRTPEVTCVVVDVSHEDPEVKFNWYVDGVHVHNAKTKPREEQYNSTYRVVSVLTVLHQDWLNGKEYKCKVSNKALPAPIEKTISKAKGQPREPQVYTLPPSRDELTKNQVSLTCLVKGFYPSDIAVEWESNGQPENNYKTTPPVLDSDGSFFLYSKLTVDKSRWQQGNVFSCSVMHEALHNHYTQKSLSLSPGK

SEQ ID NO: 1252 - protein, 248 aa, Artificial
  Synthetic
CNVNHKPSNTKVDKKVEPKSCDKTHTCPPCPAPELLGGPSVFLFPPKPKDTLMISRTPEVTCVVVDVSHEDPEVKFNWYVDGVLVHNAKTKPREEQYNSTYRVVSVLTVLHQDWLNGKEYKCKVSNKALPAPIEKTISKAKGQPREPQVYTLPPSRDELTKNQVSLTCLVKGFYPSDIAVEWESNGQPENNYKTTPPVLDSDGSFFLYSKLTVDKSRWQQGNVFSCSVMHEALHNHYTQKSLSLSPGK

SEQ ID NO: 1253 - protein, 248 aa, Artificial
  Synthetic
CNVNHKPSNTKVDKKVEPKSCDKTHTCPPCPAPELLGGPSVFLFPPKPKDTLMISRTPEVTCVVVDVSHEDPEVKFNWYVDGVYVHNAKTKPREEQYNSTYRVVSVLTVLHQDWLNGKEYKCKVSNKALPAPIEKTISKAKGQPREPQVYTLPPSRDELTKNQVSLTCLVKGFYPSDIAVEWESNGQPENNYKTTPPVLDSDGSFFLYSKLTVDKSRWQQGNVFSCSVMHEALHNHYTQKSLSLSPGK

SEQ ID NO: 1254 - protein, 248 aa, Artificial
  Synthetic
CNVNHKPSNTKVDKKVEPKSCDKTHTCPPCPAPELLGGPSVFLFPPKPKDTLMISRTPEVTCVVVDVSHEDPEVKFNWYVDGVPVHNAKTKPREEQYNSTYRVVSVLTVLHQDWLNGKEYKCKVSNKALPAPIEKTISKAKGQPREPQVYTLPPSRDELTKNQVSLTCLVKGFYPSDIAVEWESNGQPENNYKTTPPVLDSDGSFFLYSKLTVDKSRWQQGNVFSCSVMHEALHNHYTQKSLSLSPGK

SEQ ID NO: 1255 - protein, 248 aa, Artificial
  Synthetic
CNVNHKPSNTKVDKKVEPKSCDKTHTCPPCPAPELLGGPSVFLFPPKPKDTLMISRTPEVTCVVVDVSHEDPEVKFNWYVDGVGVHNAKTKPREEQYNSTYRVVSVLTVLHQDWLNGKEYKCKVSNKALPAPIEKTISKAKGQPREPQVYTLPPSRDELTKNQVSLTCLVKGFYPSDIAVEWESNGQPENNYKTTPPVLDSDGSFFLYSKLTVDKSRWQQGNVFSCSVMHEALHNHYTQKSLSLSPGK

SEQ ID NO: 1256 - protein, 248 aa, Artificial
  Synthetic
CNVNHKPSNTKVDKKVEPKSCDKTHTCPPCPAPELLGGPSVFLFPPKPKDTLMISRTPEVTCVVVDVSHEDPEVKFNWYVDGVEEHNAKTKPREEQYNSTYRVVSVLTVLHQDWLNGKEYKCKVSNKALPAPIEKTISKAKGQPREPQVYTLPPSRDELTKNQVSLTCLVKGFYPSDIAVEWESNGQPENNYKTTPPVLDSDGSFFLYSKLTVDKSRWQQGNVFSCSVMHEALHNHYTQKSLSLSPGK

SEQ ID NO: 1257 - protein, 248 aa, Artificial
  Synthetic
CNVNHKPSNTKVDKKVEPKSCDKTHTCPPCPAPELLGGPSVFLFPPKPKDTLMISRTPEVTCVVVDVSHEDPEVKFNWYVDGVENHNAKTKPREEQYNSTYRVVSVLTVLHQDWLNGKEYKCKVSNKALPAPIEKTISKAKGQPREPQVYTLPPSRDELTKNQVSLTCLVKGFYPSDIAVEWESNGQPENNYKTTPPVLDSDGSFFLYSKLTVDKSRWQQGNVFSCSVMHEALHNHYTQKSLSLSPGK

SEQ ID NO: 1258 - protein, 248 aa, Artificial
  Synthetic
CNVNHKPSNTKVDKKVEPKSCDKTHTCPPCPAPELLGGPSVFLFPPKPKDTLMISRTPEVTCVVVDVSHEDPEVKFNWYVDGVETHNAKTKPREEQYNSTYRVVSVLTVLHQDWLNGKEYKCKVSNKALPAPIEKTISKAKGQPREPQVYTLPPSRDELTKNQVSLTCLVKGFYPSDIAVEWESNGQPENNYKTTPPVLDSDGSFFLYSKLTVDKSRWQQGNVFSCSVMHEALHNHYTQKSLSLSPGK

SEQ ID NO: 1259 - protein, 248 aa, Artificial
  Synthetic
CNVNHKPSNTKVDKKVEPKSCDKTHTCPPCPAPELLGGPSVFLFPPKPKDTLMISRTPEVTCVVVDVSHEDPEVKFNWYVDGVELHNAKTKPREEQYNSTYRVVSVLTVLHQDWLNGKEYKCKVSNKALPAPIEKTISKAKGQPREPQVYTLPPSRDELTKNQVSLTCLVKGFYPSDIAVEWESNGQPENNYKTTPPVLDSDGSFFLYSKLTVDKSRWQQGNVFSCSVMHEALHNHYTQKSLSLSPGK

SEQ ID NO: 1260 - protein, 248 aa, Artificial
  Synthetic
CNVNHKPSNTKVDKKVEPKSCDKTHTCPPCPAPELLGGPSVFLFPPKPKDTLMISRTPEVTCVVVDVSHEDPEVKFNWYVDGVEYHNAKTKPREEQYNSTYRVVSVLTVLHQDWLNGKEYKCKVSNKALPAPIEKTISKAKGQPREPQVYTLPPSRDELTKNQVSLTCLVKGFYPSDIAVEWESNGQPENNYKTTPPVLDSDGSFFLYSKLTVDKSRWQQGNVFSCSVMHEALHNHYTQKSLSLSPGK

SEQ ID NO: 1261 - protein, 248 aa, Artificial
  Synthetic
CNVNHKPSNTKVDKKVEPKSCDKTHTCPPCPAPELLGGPSVFLFPPKPKDTLMISRTPEVTCVVVDVSHEDPEVKFNWYVDGVEVHNAKTKDREEQYNSTYRVVSVLTVLHQDWLNGKEYKCKVSNKALPAPIEKTISKAKGQPREPQVYTLPPSRDELTKNQVSLTCLVKGFYPSDIAVEWESNGQPENNYKTTPPVLDSDGSFFLYSKLTVDKSRWQQGNVFSCSVMHEALHNHYTQKSLSLSPGK

SEQ ID NO: 1262 - protein, 248 aa, Artificial
  Synthetic
CNVNHKPSNTKVDKKVEPKSCDKTHTCPPCPAPELLGGPSVFLFPPKPKDTLMISRTPEVTCVVVDVSHEDPEVKFNWYVDGVEVHNAKTKEREEQYNSTYRVVSVLTVLHQDWLNGKEYKCKVSNKALPAPIEKTISKAKGQPREPQVYTLPPSRDELTKNQVSLTCLVKGFYPSDIAVEWESNGQPENNYKTTPPVLDSDGSFFLYSKLTVDKSRWQQGNVFSCSVMHEALHNHYTQKSLSLSPGK

SEQ ID NO: 1263 - protein, 248 aa, Artificial
  Synthetic
CNVNHKPSNTKVDKKVEPKSCDKTHTCPPCPAPELLGGPSVFLFPPKPKDTLMISRTPEVTCVVVDVSHEDPEVKFNWYVDGVEVHNAKTKQREEQYNSTYRVVSVLTVLHQDWLNGKEYKCKVSNKALPAPIEKTISKAKGQPREPQVYTLPPSRDELTKNQVSLTCLVKGFYPSDIAVEWESNGQPENNYKTTPPVLDSDGSFFLYSKLTVDKSRWQQGNVFSCSVMHEALHNHYTQKSLSLSPGK

SEQ ID NO: 1264 - protein, 248 aa, Artificial
  Synthetic
CNVNHKPSNTKVDKKVEPKSCDKTHTCPPCPAPELLGGPSVFLFPPKPKDTLMISRTPEVTCVVVDVSHEDPEVKFNWYVDGVEVHNAKTKTREEQYNSTYRVVSVLTVLHQDWLNGKEYKCKVSNKALPAPIEKTISKAKGQPREPQVYTLPPSRDELTKNQVSLTCLVKGFYPSDIAVEWESNGQPENNYKTTPPVLDSDGSFFLYSKLTVDKSRWQQGNVFSCSVMHEALHNHYTQKSLSLSPGK

SEQ ID NO: 1265 - protein, 248 aa, Artificial
  Synthetic
CNVNHKPSNTKVDKKVEPKSCDKTHTCPPCPAPELLGGPSVFLFPPKPKDTLMISRTPEVTCVVVDVSHEDPEVKFNWYVDGVEVHNAKTKHREEQYNSTYRVVSVLTVLHQDWLNGKEYKCKVSNKALPAPIEKTISKAKGQPREPQVYTLPPSRDELTKNQVSLTCLVKGFYPSDIAVEWESNGQPENNYKTTPPVLDSDGSFFLYSKLTVDKSRWQQGNVFSCSVMHEALHNHYTQKSLSLSPGK

SEQ ID NO: 1266 - protein, 248 aa, Artificial
  Synthetic
CNVNHKPSNTKVDKKVEPKSCDKTHTCPPCPAPELLGGPSVFLFPPKPKDTLMISRTPEVTCVVVDVSHEDPEVKFNWYVDGVEVHNAKTKIREEQYNSTYRVVSVLTVLHQDWLNGKEYKCKVSNKALPAPIEKTISKAKGQPREPQVYTLPPSRDELTKNQVSLTCLVKGFYPSDIAVEWESNGQPENNYKTTPPVLDSDGSFFLYSKLTVDKSRWQQGNVFSCSVMHEALHNHYTQKSLSLSPGK

SEQ ID NO: 1267 - protein, 248 aa, Artificial
  Synthetic
CNVNHKPSNTKVDKKVEPKSCDKTHTCPPCPAPELLGGPSVFLFPPKPKDTLMISRTPEVTCVVVDVSHEDPEVKFNWYVDGVEVHNAKTKGREEQYNSTYRVVSVLTVLHQDWLNGKEYKCKVSNKALPAPIEKTISKAKGQPREPQVYTLPPSRDELTKNQVSLTCLVKGFYPSDIAVEWESNGQPENNYKTTPPVLDSDGSFFLYSKLTVDKSRWQQGNVFSCSVMHEALHNHYTQKSLSLSPGK

SEQ ID NO: 1268 - protein, 248 aa, Artificial
  Synthetic
CNVNHKPSNTKVDKKVEPKSCDKTHTCPPCPAPELLGGPDVFLFPPKPKDTLMISRTPEVTCVVVDVSHEDPEVKFNWYVDGVEVHNAKTKPREEQYQSTYRVVSVLTVLHQDWLNGKEYKCKVSNKALPAPEEKTISKAKGQPREPQVYTLPPSRDELTKNQVSLTCLVKGFYPSDIAVEWESNGQPENNYKTTPPVLDSDGSFFLYSKLTVDKSRWQQGNVFSCSVMHEALHNHYTQKSLSLSPGK

SEQ ID NO: 1269 - protein, 248 aa, Artificial
  Synthetic
CNVNHKPSNTKVDKKVEPKSCDKTHTCPPCPAPELLGGPDVFLFPPKPKDTLMISRTPEVTCVVVDVSHEDPEVKFNWYVDGVEVHNAKTKPREEQYKSTYRVVSVLTVLHQDWLNGKEYKCKVSNKALPAPEEKTISKAKGQPREPQVYTLPPSRDELTKNQVSLTCLVKGFYPSDIAVEWESNGQPENNYKTTPPVLDSDGSFFLYSKLTVDKSRWQQGNVFSCSVMHEALHNHYTQKSLSLSPGK

SEQ ID NO: 1270 - protein, 248 aa, Artificial
  Synthetic
CNVNHKPSNTKVDKKVEPKSCDKTHTCPPCPAPELLGGPDVFLFPPKPKDTLMISRTPEVTCVVVDVSHEDPEVKFNWYVDGVEVHNAKTKPREEQYRSTYRVVSVLTVLHQDWLNGKEYKCKVSNKALPAPEEKTISKAKGQPREPQVYTLPPSRDELTKNQVSLTCLVKGFYPSDIAVEWESNGQPENNYKTTPPVLDSDGSFFLYSKLTVDKSRWQQGNVFSCSVMHEALHNHYTQKSLSLSPGK

SEQ ID NO: 1271 - protein, 248 aa, Artificial
  Synthetic
CNVNHKPSNTKVDKKVEPKSCDKTHTCPPCPAPELLGGPDVFLFPPKPKDTLMISRTPEVTCVVVDVSHEDPEVKFNWYVDGVEVHNAKTKPREEQYTSTYRVVSVLTVLHQDWLNGKEYKCKVSNKALPAPEEKTISKAKGQPREPQVYTLPPSRDELTKNQVSLTCLVKGFYPSDIAVEWESNGQPENNYKTTPPVLDSDGSFFLYSKLTVDKSRWQQGNVFSCSVMHEALHNHYTQKSLSLSPGK

SEQ ID NO: 1272 - protein, 248 aa, Artificial
  Synthetic
CNVNHKPSNTKVDKKVEPKSCDKTHTCPPCPAPELLGGPDVFLFPPKPKDTLMISRTPEVTCVVVDVSHEDPEVKFNWYVDGVEVHNAKTKPREEQYHSTYRVVSVLTVLHQDWLNGKEYKCKVSNKALPAPEEKTISKAKGQPREPQVYTLPPSRDELTKNQVSLTCLVKGFYPSDIAVEWESNGQPENNYKTTPPVLDSDGSFFLYSKLTVDKSRWQQGNVFSCSVMHEALHNHYTQKSLSLSPGK

SEQ ID NO: 1273 - protein, 248 aa, Artificial
  Synthetic
CNVNHKPSNTKVDKKVEPKSCDKTHTCPPCPAPELLGGPDVFLFPPKPKDTLMISRTPEVTCVVVDVSHEDPEVKFNWYVDGVEVHNAKTKPREEQYVSTYRVVSVLTVLHQDWLNGKEYKCKVSNKALPAPEEKTISKAKGQPREPQVYTLPPSRDELTKNQVSLTCLVKGFYPSDIAVEWESNGQPENNYKTTPPVLDSDGSFFLYSKLTVDKSRWQQGNVFSCSVMHEALHNHYTQKSLSLSPGK

SEQ ID NO: 1274 - protein, 248 aa, Artificial
  Synthetic
CNVNHKPSNTKVDKKVEPKSCDKTHTCPPCPAPELLGGPDVFLFPPKPKDTLMISRTPEVTCVVVDVSHEDPEVKFNWYVDGVEVHNAKTKPREEQYLSTYRVVSVLTVLHQDWLNGKEYKCKVSNKALPAPEEKTISKAKGQPREPQVYTLPPSRDELTKNQVSLTCLVKGFYPSDIAVEWESNGQPENNYKTTPPVLDSDGSFFLYSKLTVDKSRWQQGNVFSCSVMHEALHNHYTQKSLSLSPGK

SEQ ID NO: 1275 - protein, 248 aa, Artificial
  Synthetic
CNVNHKPSNTKVDKKVEPKSCDKTHTCPPCPAPELLGGPDVFLFPPKPKDTLMISRTPEVTCVVVDVSHEDPEVKFNWYVDGVEVHNAKTKPREEQYISTYRVVSVLTVLHQDWLNGKEYKCKVSNKALPAPEEKTISKAKGQPREPQVYTLPPSRDELTKNQVSLTCLVKGFYPSDIAVEWESNGQPENNYKTTPPVLDSDGSFFLYSKLTVDKSRWQQGNVFSCSVMHEALHNHYTQKSLSLSPGK

SEQ ID NO: 1276 - protein, 248 aa, Artificial
  Synthetic
CNVNHKPSNTKVDKKVEPKSCDKTHTCPPCPAPELLGGPDVFLFPPKPKDTLMISRTPEVTCVVVDVSHEDPEVKFNWYVDGVEVHNAKTKPREEQYFSTYRVVSVLTVLHQDWLNGKEYKCKVSNKALPAPEEKTISKAKGQPREPQVYTLPPSRDELTKNQVSLTCLVKGFYPSDIAVEWESNGQPENNYKTTPPVLDSDGSFFLYSKLTVDKSRWQQGNVFSCSVMHEALHNHYTQKSLSLSPGK

SEQ ID NO: 1277 - protein, 248 aa, Artificial
  Synthetic
CNVNHKPSNTKVDKKVEPKSCDKTHTCPPCPAPELLGGPDVFLFPPKPKDTLMISRTPEVTCVVVDVSHEDPEVKFNWYVDGVEVHNAKTKPREEQYMSTYRVVSVLTVLHQDWLNGKEYKCKVSNKALPAPEEKTISKAKGQPREPQVYTLPPSRDELTKNQVSLTCLVKGFYPSDIAVEWESNGQPENNYKTTPPVLDSDGSFFLYSKLTVDKSRWQQGNVFSCSVMHEALHNHYTQKSLSLSPGK

SEQ ID NO: 1278 - protein, 248 aa, Artificial
  Synthetic
CNVNHKPSNTKVDKKVEPKSCDKTHTCPPCPAPELLGGPDVFLFPPKPKDTLMISRTPEVTCVVVDVSHEDPEVKFNWYVDGVEVHNAKTKPREEQYYSTYRVVSVLTVLHQDWLNGKEYKCKVSNKALPAPEEKTISKAKGQPREPQVYTLPPSRDELTKNQVSLTCLVKGFYPSDIAVEWESNGQPENNYKTTPPVLDSDGSFFLYSKLTVDKSRWQQGNVFSCSVMHEALHNHYTQKSLSLSPGK

SEQ ID NO: 1279 - protein, 248 aa, Artificial
  Synthetic
CNVNHKPSNTKVDKKVEPKSCDKTHTCPPCPAPELLGGPDVFLFPPKPKDTLMISRTPEVTCVVVDVSHEDPEVKFNWYVDGVEVHNAKTKPREEQYWSTYRVVSVLTVLHQDWLNGKEYKCKVSNKALPAPEEKTISKAKGQPREPQVYTLPPSRDELTKNQVSLTCLVKGFYPSDIAVEWESNGQPENNYKTTPPVLDSDGSFFLYSKLTVDKSRWQQGNVFSCSVMHEALHNHYTQKSLSLSPGK

SEQ ID NO: 1280 - protein, 248 aa, Artificial
  Synthetic
CNVNHKPSNTKVDKKVEPKSCDKTHTCPPCPAPELLGGPDVFLFPPKPKDTLMISRTPEVTCVVVDVSHEDPEVKFNWYVDGVEVHNAKTKPREEQYPSTYRVVSVLTVLHQDWLNGKEYKCKVSNKALPAPEEKTISKAKGQPREPQVYTLPPSRDELTKNQVSLTCLVKGFYPSDIAVEWESNGQPENNYKTTPPVLDSDGSFFLYSKLTVDKSRWQQGNVFSCSVMHEALHNHYTQKSLSLSPGK

SEQ ID NO: 1281 - protein, 248 aa, Artificial
  Synthetic
CNVNHKPSNTKVDKKVEPKSCDKTHTCPPCPAPELLGGPDVFLFPPKPKDTLMISRTPEVTCVVVDVSHEDPEVKFNWYVDGVEVHNAKTKPREEQYGSTYRVVSVLTVLHQDWLNGKEYKCKVSNKALPAPEEKTISKAKGQPREPQVYTLPPSRDELTKNQVSLTCLVKGFYPSDIAVEWESNGQPENNYKTTPPVLDSDGSFFLYSKLTVDKSRWQQGNVFSCSVMHEALHNHYTQKSLSLSPGK

SEQ ID NO: 1282 - protein, 248 aa, Artificial
  Synthetic
CNVNHKPSNTKVDKKVEPKSCDKTHTCPPCPAPELLGGPSVFLFPPKPKDTLMISRTPEVTCVVVDVSHEDPEVKFNWYVDGVEVHNAKTKPREEQYNSTYDVVSVLTVLHQDWLNGKEYKCKVSNKALPAPIEKTISKAKGQPREPQVYTLPPSRDELTKNQVSLTCLVKGFYPSDIAVEWESNGQPENNYKTTPPVLDSDGSFFLYSKLTVDKSRWQQGNVFSCSVMHEALHNHYTQKSLSLSPGK

SEQ ID NO: 1283 - protein, 248 aa, Artificial
  Synthetic
CNVNHKPSNTKVDKKVEPKSCDKTHTCPPCPAPELLGGPSVFLFPPKPKDTLMISRTPEVTCVVVDVSHEDPEVKFNWYVDGVEVHNAKTKPREEQYNSTYEVVSVLTVLHQDWLNGKEYKCKVSNKALPAPIEKTISKAKGQPREPQVYTLPPSRDELTKNQVSLTCLVKGFYPSDIAVEWESNGQPENNYKTTPPVLDSDGSFFLYSKLTVDKSRWQQGNVFSCSVMHEALHNHYTQKSLSLSPGK

SEQ ID NO: 1284 - protein, 248 aa, Artificial
  Synthetic
CNVNHKPSNTKVDKKVEPKSCDKTHTCPPCPAPELLGGPSVFLFPPKPKDTLMISRTPEVTCVVVDVSHEDPEVKFNWYVDGVEVHNAKTKPREEQYNSTYHVVSVLTVLHQDWLNGKEYKCKVSNKALPAPIEKTISKAKGQPREPQVYTLPPSRDELTKNQVSLTCLVKGFYPSDIAVEWESNGQPENNYKTTPPVLDSDGSFFLYSKLTVDKSRWQQGNVFSCSVMHEALHNHYTQKSLSLSPGK

SEQ ID NO: 1285 - protein, 248 aa, Artificial
  Synthetic
CNVNHKPSNTKVDKKVEPKSCDKTHTCPPCPAPELLGGPSVFLFPPKPKDTLMISRTPEVTCVVVDVSHEDPEVKFNWYVDGVEVHNAKTKPREEQYNSTYYVVSVLTVLHQDWLNGKEYKCKVSNKALPAPIEKTISKAKGQPREPQVYTLPPSRDELTKNQVSLTCLVKGFYPSDIAVEWESNGQPENNYKTTPPVLDSDGSFFLYSKLTVDKSRWQQGNVFSCSVMHEALHNHYTQKSLSLSPGK

SEQ ID NO: 1286 - protein, 248 aa, Artificial
  Synthetic
CNVNHKPSNTKVDKKVEPKSCDKTHTCPPCPAPELLGGPSVFLFPPKPKDTLMISRTPEVTCVVVDVSHEDPEVKFNWYVDGVEVHNAKTKPREEQYNSTYRVDSVLTVLHQDWLNGKEYKCKVSNKALPAPIEKTISKAKGQPREPQVYTLPPSRDELTKNQVSLTCLVKGFYPSDIAVEWESNGQPENNYKTTPPVLDSDGSFFLYSKLTVDKSRWQQGNVFSCSVMHEALHNHYTQKSLSLSPGK

SEQ ID NO: 1287 - protein, 248 aa, Artificial
  Synthetic
CNVNHKPSNTKVDKKVEPKSCDKTHTCPPCPAPELLGGPSVFLFPPKPKDTLMISRTPEVTCVVVDVSHEDPEVKFNWYVDGVEVHNAKTKPREEQYNSTYRVESVLTVLHQDWLNGKEYKCKVSNKALPAPIEKTISKAKGQPREPQVYTLPPSRDELTKNQVSLTCLVKGFYPSDIAVEWESNGQPENNYKTTPPVLDSDGSFFLYSKLTVDKSRWQQGNVFSCSVMHEALHNHYTQKSLSLSPGK

SEQ ID NO: 1288 - protein, 248 aa, Artificial
  Synthetic
CNVNHKPSNTKVDKKVEPKSCDKTHTCPPCPAPELLGGPSVFLFPPKPKDTLMISRTPEVTCVVVDVSHEDPEVKFNWYVDGVEVHNAKTKPREEQYNSTYRVYSVLTVLHQDWLNGKEYKCKVSNKALPAPIEKTISKAKGQPREPQVYTLPPSRDELTKNQVSLTCLVKGFYPSDIAVEWESNGQPENNYKTTPPVLDSDGSFFLYSKLTVDKSRWQQGNVFSCSVMHEALHNHYTQKSLSLSPGK

SEQ ID NO: 1289 - protein, 248 aa, Artificial
  Synthetic
CNVNHKPSNTKVDKKVEPKSCDKTHTCPPCPAPELLGGPSVFLFPPKPKDTLMISRTPEVTCVVVDVSHEDPEVKFNWYVDGVEVHNAKTKPREEQYNSTYRVVDVLTVLHQDWLNGKEYKCKVSNKALPAPIEKTISKAKGQPREPQVYTLPPSRDELTKNQVSLTCLVKGFYPSDIAVEWESNGQPENNYKTTPPVLDSDGSFFLYSKLTVDKSRWQQGNVFSCSVMHEALHNHYTQKSLSLSPGK

SEQ ID NO: 1290 - protein, 248 aa, Artificial
  Synthetic
CNVNHKPSNTKVDKKVEPKSCDKTHTCPPCPAPELLGGPSVFLFPPKPKDTLMISRTPEVTCVVVDVSHEDPEVKFNWYVDGVEVHNAKTKPREEQYNSTYRVVNVLTVLHQDWLNGKEYKCKVSNKALPAPIEKTISKAKGQPREPQVYTLPPSRDELTKNQVSLTCLVKGFYPSDIAVEWESNGQPENNYKTTPPVLDSDGSFFLYSKLTVDKSRWQQGNVFSCSVMHEALHNHYTQKSLSLSPGK

SEQ ID NO: 1291 - protein, 248 aa, Artificial
  Synthetic
CNVNHKPSNTKVDKKVEPKSCDKTHTCPPCPAPELLGGPSVFLFPPKPKDTLMISRTPEVTCVVVDVSHEDPEVKFNWYVDGVEVHNAKTKPREEQYNSTYRVVTVLTVLHQDWLNGKEYKCKVSNKALPAPIEKTISKAKGQPREPQVYTLPPSRDELTKNQVSLTCLVKGFYPSDIAVEWESNGQPENNYKTTPPVLDSDGSFFLYSKLTVDKSRWQQGNVFSCSVMHEALHNHYTQKSLSLSPGK

SEQ ID NO: 1292 - protein, 248 aa, Artificial
  Synthetic
CNVNHKPSNTKVDKKVEPKSCDKTHTCPPCPAPELLGGPSVFLFPPKPKDTLMISRTPEVTCVVVDVSHEDPEVKFNWYVDGVEVHNAKTKPREEQYNSTYRVVHVLTVLHQDWLNGKEYKCKVSNKALPAPIEKTISKAKGQPREPQVYTLPPSRDELTKNQVSLTCLVKGFYPSDIAVEWESNGQPENNYKTTPPVLDSDGSFFLYSKLTVDKSRWQQGNVFSCSVMHEALHNHYTQKSLSLSPGK

SEQ ID NO: 1293 - protein, 248 aa, Artificial
  Synthetic
CNVNHKPSNTKVDKKVEPKSCDKTHTCPPCPAPELLGGPSVFLFPPKPKDTLMISRTPEVTCVVVDVSHEDPEVKFNWYVDGVEVHNAKTKPREEQYNSTYRVVLVLTVLHQDWLNGKEYKCKVSNKALPAPIEKTISKAKGQPREPQVYTLPPSRDELTKNQVSLTCLVKGFYPSDIAVEWESNGQPENNYKTTPPVLDSDGSFFLYSKLTVDKSRWQQGNVFSCSVMHEALHNHYTQKSLSLSPGK

SEQ ID NO: 1294 - protein, 248 aa, Artificial
  Synthetic
CNVNHKPSNTKVDKKVEPKSCDKTHTCPPCPAPELLGGPSVFLFPPKPKDTLMISRTPEVTCVVVDVSHEDPEVKFNWYVDGVEVHNAKTKPREEQYNSTYRVVSELTVLHQDWLNGKEYKCKVSNKALPAPIEKTISKAKGQPREPQVYTLPPSRDELTKNQVSLTCLVKGFYPSDIAVEWESNGQPENNYKTTPPVLDSDGSFFLYSKLTVDKSRWQQGNVFSCSVMHEALHNHYTQKSLSLSPGK

SEQ ID NO: 1295 - protein, 248 aa, Artificial
  Synthetic
CNVNHKPSNTKVDKKVEPKSCDKTHTCPPCPAPELLGGPSVFLFPPKPKDTLMISRTPEVTCVVVDVSHEDPEVKFNWYVDGVEVHNAKTKPREEQYNSTYRVVSTLTVLHQDWLNGKEYKCKVSNKALPAPIEKTISKAKGQPREPQVYTLPPSRDELTKNQVSLTCLVKGFYPSDIAVEWESNGQPENNYKTTPPVLDSDGSFFLYSKLTVDKSRWQQGNVFSCSVMHEALHNHYTQKSLSLSPGK

SEQ ID NO: 1296 - protein, 248 aa, Artificial
  Synthetic
CNVNHKPSNTKVDKKVEPKSCDKTHTCPPCPAPELLGGPSVFLFPPKPKDTLMISRTPEVTCVVVDVSHEDPEVKFNWYVDGVEVHNAKTKPREEQYNSTYRVVSYLTVLHQDWLNGKEYKCKVSNKALPAPIEKTISKAKGQPREPQVYTLPPSRDELTKNQVSLTCLVKGFYPSDIAVEWESNGQPENNYKTTPPVLDSDGSFFLYSKLTVDKSRWQQGNVFSCSVMHEALHNHYTQKSLSLSPGK

SEQ ID NO: 1297 - protein, 248 aa, Artificial
  Synthetic
CNVNHKPSNTKVDKKVEPKSCDKTHTCPPCPAPELLGGPSVFLFPPKPKDTLMISRTPEVTCVVVDVSHEDPEVKFNWYVDGVEVHNAKTKPREEQYNSTYRVVSVLTVLHQDWLNGEEYKCKVSNKALPAPIEKTISKAKGQPREPQVYTLPPSRDELTKNQVSLTCLVKGFYPSDIAVEWESNGQPENNYKTTPPVLDSDGSFFLYSKLTVDKSRWQQGNVFSCSVMHEALHNHYTQKSLSLSPGK

SEQ ID NO: 1298 - protein, 248 aa, Artificial
  Synthetic
CNVNHKPSNTKVDKKVEPKSCDKTHTCPPCPAPELLGGPSVFLFPPKPKDTLMISRTPEVTCVVVDVSHEDPEVKFNWYVDGVEVHNAKTKPREEQYNSTYRVVSVLTVLHQDWLNGQEYKCKVSNKALPAPIEKTISKAKGQPREPQVYTLPPSRDELTKNQVSLTCLVKGFYPSDIAVEWESNGQPENNYKTTPPVLDSDGSFFLYSKLTVDKSRWQQGNVFSCSVMHEALHNHYTQKSLSLSPGK

SEQ ID NO: 1299 - protein, 248 aa, Artificial
  Synthetic
CNVNHKPSNTKVDKKVEPKSCDKTHTCPPCPAPELLGGPSVFLFPPKPKDTLMISRTPEVTCVVVDVSHEDPEVKFNWYVDGVEVHNAKTKPREEQYNSTYRVVSVLTVLHQDWLNGKQYKCKVSNKALPAPIEKTISKAKGQPREPQVYTLPPSRDELTKNQVSLTCLVKGFYPSDIAVEWESNGQPENNYKTTPPVLDSDGSFFLYSKLTVDKSRWQQGNVFSCSVMHEALHNHYTQKSLSLSPGK

SEQ ID NO: 1300 - protein, 248 aa, Artificial
  Synthetic
CNVNHKPSNTKVDKKVEPKSCDKTHTCPPCPAPELLGGPSVFLFPPKPKDTLMISRTPEVTCVVVDVSHEDPEVKFNWYVDGVEVHNAKTKPREEQYNSTYRVVSVLTVLHQDWLNGKHYKCKVSNKALPAPIEKTISKAKGQPREPQVYTLPPSRDELTKNQVSLTCLVKGFYPSDIAVEWESNGQPENNYKTTPPVLDSDGSFFLYSKLTVDKSRWQQGNVFSCSVMHEALHNHYTQKSLSLSPGK

SEQ ID NO: 1301 - protein, 248 aa, Artificial
  Synthetic
CNVNHKPSNTKVDKKVEPKSCDKTHTCPPCPAPELLGGPSVFLFPPKPKDTLMISRTPEVTCVVVDVSHEDPEVKFNWYVDGVEVHNAKTKPREEQYNSTYRVVSVLTVLHQDWLNGKLYKCKVSNKALPAPIEKTISKAKGQPREPQVYTLPPSRDELTKNQVSLTCLVKGFYPSDIAVEWESNGQPENNYKTTPPVLDSDGSFFLYSKLTVDKSRWQQGNVFSCSVMHEALHNHYTQKSLSLSPGK

SEQ ID NO: 1302 - protein, 248 aa, Artificial
  Synthetic
CNVNHKPSNTKVDKKVEPKSCDKTHTCPPCPAPELLGGPSVFLFPPKPKDTLMISRTPEVTCVVVDVSHEDPEVKFNWYVDGVEVHNAKTKPREEQYNSTYRVVSVLTVLHQDWLNGKYYKCKVSNKALPAPIEKTISKAKGQPREPQVYTLPPSRDELTKNQVSLTCLVKGFYPSDIAVEWESNGQPENNYKTTPPVLDSDGSFFLYSKLTVDKSRWQQGNVFSCSVMHEALHNHYTQKSLSLSPGK

SEQ ID NO: 1303 - protein, 248 aa, Artificial
  Synthetic
CNVNHKPSNTKVDKKVEPKSCDKTHTCPPCPAPELLGGPSVFLFPPKPKDTLMISRTPEVTCVVVDVSHEDPEVKFNWYVDGVEVHNAKTKPREEQYNSTYRVVSVLTVLHQDWLNGKEYKCKVSNKALPAPIEKTESKAKGQPREPQVYTLPPSRDELTKNQVSLTCLVKGFYPSDIAVEWESNGQPENNYKTTPPVLDSDGSFFLYSKLTVDKSRWQQGNVFSCSVMHEALHNHYTQKSLSLSPGK

SEQ ID NO: 1304 - protein, 248 aa, Artificial
  Synthetic
CNVNHKPSNTKVDKKVEPKSCDKTHTCPPCPAPELLGGPSVFLFPPKPKDTLMISRTPEVTCVVVDVSHEDPEVKFNWYVDGVEVHNAKTKPREEQYNSTYRVVSVLTVLHQDWLNGKEYKCKVSNKALPAPIEKTKSKAKGQPREPQVYTLPPSRDELTKNQVSLTCLVKGFYPSDIAVEWESNGQPENNYKTTPPVLDSDGSFFLYSKLTVDKSRWQQGNVFSCSVMHEALHNHYTQKSLSLSPGK

SEQ ID NO: 1305 - protein, 248 aa, Artificial
  Synthetic
CNVNHKPSNTKVDKKVEPKSCDKTHTCPPCPAPELLGGPSVFLFPPKPKDTLMISRTPEVTCVVVDVSHEDPEVKFNWYVDGVEVHNAKTKPREEQYNSTYRVVSVLTVLHQDWLNGKEYKCKVSNKALPAPIEKTYSKAKGQPREPQVYTLPPSRDELTKNQVSLTCLVKGFYPSDIAVEWESNGQPENNYKTTPPVLDSDGSFFLYSKLTVDKSRWQQGNVFSCSVMHEALHNHYTQKSLSLSPGK

SEQ ID NO: 1306 - protein, 248 aa, Artificial
  Synthetic
CNVNHKPSNTKVDKKVEPKSCDKTHTCPPCPAPELLGGPSVFLFPPKPKDTLMISRTPEVTCVVVDVSHEDPEVKFNWYVDGVEVHNAKTKPREEQYNSTYRVVSVLTVLHQDWLNGKEYKCKVSNKALPAPIEKTIEKAKGQPREPQVYTLPPSRDELTKNQVSLTCLVKGFYPSDIAVEWESNGQPENNYKTTPPVLDSDGSFFLYSKLTVDKSRWQQGNVFSCSVMHEALHNHYTQKSLSLSPGK

SEQ ID NO: 1307 - protein, 248 aa, Artificial
  Synthetic
CNVNHKPSNTKVDKKVEPKSCDKTHTCPPCPAPELLGGPSVFLFPPKPKDTLMISRTPEVTCVVVDVSHEDPEVKFNWYVDGVEVHNAKTKPREEQYNSTYRVVSVLTVLHQDWLNGKEYKCKVSNKALPAPIEKTINKAKGQPREPQVYTLPPSRDELTKNQVSLTCLVKGFYPSDIAVEWESNGQPENNYKTTPPVLDSDGSFFLYSKLTVDKSRWQQGNVFSCSVMHEALHNHYTQKSLSLSPGK

SEQ ID NO: 1308 - protein, 248 aa, Artificial
  Synthetic
CNVNHKPSNTKVDKKVEPKSCDKTHTCPPCPAPELLGGPSVFLFPPKPKDTLMISRTPEVTCVVVDVSHEDPEVKFNWYVDGVEVHNAKTKPREEQYNSTYRVVSVLTVLHQDWLNGKEYKCKVSNKALPAPIEKTIHKAKGQPREPQVYTLPPSRDELTKNQVSLTCLVKGFYPSDIAVEWESNGQPENNYKTTPPVLDSDGSFFLYSKLTVDKSRWQQGNVFSCSVMHEALHNHYTQKSLSLSPGK

SEQ ID NO: 1309 - protein, 248 aa, Artificial
  Synthetic
CNVNHKPSNTKVDKKVEPKSCDKTHTCPPCPAPELLGGPDVFLFPPKPKDTLMISRTPEVTCVVVDVSHEDPYVKFNWYVDGVEVHNAKTKPREEQYNSTYRVVSVLTVLHQDWLNGKEYKCKVSNKALPAPEEKTISKAKGQPREPQVYTLPPSRDELTKNQVSLTCLVKGFYPSDIAVEWESNGQPENNYKTTPPVLDSDGSFFLYSKLTVDKSRWQQGNVFSCSVMHEALHNHYTQKSLSLSPGK

SEQ ID NO: 1310 - protein, 248 aa, Artificial
  Synthetic
CNVNHKPSNTKVDKKVEPKSCDKTHTCPPCPAPELLGGPDVFLFPPKPKDTLMISRTPEVTCVVVDVSHEDPSVKFNWYVDGVEVHNAKTKPREEQYNSTYRVVSVLTVLHQDWLNGKEYKCKVSNKALPAPEEKTISKAKGQPREPQVYTLPPSRDELTKNQVSLTCLVKGFYPSDIAVEWESNGQPENNYKTTPPVLDSDGSFFLYSKLTVDKSRWQQGNVFSCSVMHEALHNHYTQKSLSLSPGK

SEQ ID NO: 1311 - protein, 248 aa, Artificial
  Synthetic
CNVNHKPSNTKVDKKVEPKSCDKTHTCPPCPAPELLGGPDVFLFPPKPKDTLMISRTPEVTCVVVDVSHEDPKVKFNWYVDGVEVHNAKTKPREEQYNSTYRVVSVLTVLHQDWLNGKEYKCKVSNKALPAPEEKTISKAKGQPREPQVYTLPPSRDELTKNQVSLTCLVKGFYPSDIAVEWESNGQPENNYKTTPPVLDSDGSFFLYSKLTVDKSRWQQGNVFSCSVMHEALHNHYTQKSLSLSPGK

SEQ ID NO: 1312 - protein, 248 aa, Artificial
  Synthetic
CNVNHKPSNTKVDKKVEPKSCDKTHTCPPCPAPELLGGPDVFLFPPKPKDTLMISRTPEVTCVVVDVSHEDPIVKFNWYVDGVEVHNAKTKPREEQYNSTYRVVSVLTVLHQDWLNGKEYKCKVSNKALPAPEEKTISKAKGQPREPQVYTLPPSRDELTKNQVSLTCLVKGFYPSDIAVEWESNGQPENNYKTTPPVLDSDGSFFLYSKLTVDKSRWQQGNVFSCSVMHEALHNHYTQKSLSLSPGK

SEQ ID NO: 1313 - protein, 248 aa, Artificial
  Synthetic
CNVNHKPSNTKVDKKVEPKSCDKTHTCPPCPAPELLGGPDVFLFPPKPKDTLMISRTPEVTCVVVDVSHEDPYVKFNWYVDGVEVHNAKTKPREEQYNSTYRVVSVLTVLHQDWLNGKEYKCKVSNKALPLPEEKTISKAKGQPREPQVYTLPPSRDELTKNQVSLTCLVKGFYPSDIAVEWESNGQPENNYKTTPPVLDSDGSFFLYSKLTVDKSRWQQGNVFSCSVMHEALHNHYTQKSLSLSPGK

SEQ ID NO: 1314 - protein, 248 aa, Artificial
  Synthetic
CNVNHKPSNTKVDKKVEPKSCDKTHTCPPCPAPELLGGPDVFLFPPKPKDTLMISRTPEVTCVVVDVSHEDPSVKFNWYVDGVEVHNAKTKPREEQYNSTYRVVSVLTVLHQDWLNGKEYKCKVSNKALPLPEEKTISKAKGQPREPQVYTLPPSRDELTKNQVSLTCLVKGFYPSDIAVEWESNGQPENNYKTTPPVLDSDGSFFLYSKLTVDKSRWQQGNVFSCSVMHEALHNHYTQKSLSLSPGK

SEQ ID NO: 1315 - protein, 248 aa, Artificial
  Synthetic
CNVNHKPSNTKVDKKVEPKSCDKTHTCPPCPAPELLGGPDVFLFPPKPKDTLMISRTPEVTCVVVDVSHEDPKVKFNWYVDGVEVHNAKTKPREEQYNSTYRVVSVLTVLHQDWLNGKEYKCKVSNKALPLPEEKTISKAKGQPREPQVYTLPPSRDELTKNQVSLTCLVKGFYPSDIAVEWESNGQPENNYKTTPPVLDSDGSFFLYSKLTVDKSRWQQGNVFSCSVMHEALHNHYTQKSLSLSPGK

SEQ ID NO: 1316 - protein, 248 aa, Artificial
  Synthetic
CNVNHKPSNTKVDKKVEPKSCDKTHTCPPCPAPELLGGPDVFLFPPKPKDTLMISRTPEVTCVVVDVSHEDPIVKFNWYVDGVEVHNAKTKPREEQYNSTYRVVSVLTVLHQDWLNGKEYKCKVSNKALPLPEEKTISKAKGQPREPQVYTLPPSRDELTKNQVSLTCLVKGFYPSDIAVEWESNGQPENNYKTTPPVLDSDGSFFLYSKLTVDKSRWQQGNVFSCSVMHEALHNHYTQKSLSLSPGK

SEQ ID NO: 1317 - protein, 248 aa, Artificial
  Synthetic
CNVNHKPSNTKVDKKVEPKSCDKTHTCPPCPAPELLGGPDVFLFPPKPKDTLMISRTPEVTCVVVDVSHEDPEVEFNWYVDGVEVHNAKTKPREEQYNSTYRVVSVLTVLHQDWLNGKEYKCKVSNKALPAPEEKTISKAKGQPREPQVYTLPPSRDELTKNQVSLTCLVKGFYPSDIAVEWESNGQPENNYKTTPPVLDSDGSFFLYSKLTVDKSRWQQGNVFSCSVMHEALHNHYTQKSLSLSPGK

SEQ ID NO: 1318 - protein, 248 aa, Artificial
  Synthetic
CNVNHKPSNTKVDKKVEPKSCDKTHTCPPCPAPELLGGPDVFLFPPKPKDTLMISRTPEVTCVVVDVSHEDPEVKFNWTVDGVEVHNAKTKPREEQYNSTYRVVSVLTVLHQDWLNGKEYKCKVSNKALPAPEEKTISKAKGQPREPQVYTLPPSRDELTKNQVSLTCLVKGFYPSDIAVEWESNGQPENNYKTTPPVLDSDGSFFLYSKLTVDKSRWQQGNVFSCSVMHEALHNHYTQKSLSLSPGK

SEQ ID NO: 1319 - protein, 248 aa, Artificial
  Synthetic
CNVNHKPSNTKVDKKVEPKSCDKTHTCPPCPAPELLGGPDVFLFPPKPKDTLMISRTPEVTCVVVDVSHEDPEVKFNWYVDGVEVHNAKTKPREEQYNSTYRVVSVLTVLHQDWLNGKEYKCKVSNTALPAPEEKTISKAKGQPREPQVYTLPPSRDELTKNQVSLTCLVKGFYPSDIAVEWESNGQPENNYKTTPPVLDSDGSFFLYSKLTVDKSRWQQGNVFSCSVMHEALHNHYTQKSLSLSPGK

SEQ ID NO: 1320 - protein, 248 aa, Artificial
  Synthetic
CNVNHKPSNTKVDKKVEPKSCDKTHTCPPCPAPELLGGPDVFLFPPKPKDTLMISRTPEVTCVVVDVSHEDPEVKFNWYVDGVEVHNAKTKPREEQYNSTYRVVSVLTVLHQDWLNGKEYKCKVSNEALPAPEEKTISKAKGQPREPQVYTLPPSRDELTKNQVSLTCLVKGFYPSDIAVEWESNGQPENNYKTTPPVLDSDGSFFLYSKLTVDKSRWQQGNVFSCSVMHEALHNHYTQKSLSLSPGK

SEQ ID NO: 1321 - protein, 248 aa, Artificial
  Synthetic
CNVNHKPSNTKVDKKVEPKSCDKTHTCPPCPAPELLGGPDVFLFPPKPKDTLMISRTPEVTCVVVDVSHEDPEVEFNWYVDGVEVHNAKTKPREEQYNSTYRVVSVLTVLHQDWLNGKEYKCKVSNKALPLPEEKTISKAKGQPREPQVYTLPPSRDELTKNQVSLTCLVKGFYPSDIAVEWESNGQPENNYKTTPPVLDSDGSFFLYSKLTVDKSRWQQGNVFSCSVMHEALHNHYTQKSLSLSPGK

SEQ ID NO: 1322 - protein, 248 aa, Artificial
  Synthetic
CNVNHKPSNTKVDKKVEPKSCDKTHTCPPCPAPELLGGPDVFLFPPKPKDTLMISRTPEVTCVVVDVSHEDPEVKFNWTVDGVEVHNAKTKPREEQYNSTYRVVSVLTVLHQDWLNGKEYKCKVSNKALPLPEEKTISKAKGQPREPQVYTLPPSRDELTKNQVSLTCLVKGFYPSDIAVEWESNGQPENNYKTTPPVLDSDGSFFLYSKLTVDKSRWQQGNVFSCSVMHEALHNHYTQKSLSLSPGK

SEQ ID NO: 1323 - protein, 248 aa, Artificial
  Synthetic
CNVNHKPSNTKVDKKVEPKSCDKTHTCPPCPAPELLGGPDVFLFPPKPKDTLMISRTPEVTCVVVDVSHEDPEVKFNWYVDGVEVHNAKTKPREEQYNSTYRVVSVLTVLHQDWLNGKEYKCKVSNEALPLPEEKTISKAKGQPREPQVYTLPPSRDELTKNQVSLTCLVKGFYPSDIAVEWESNGQPENNYKTTPPVLDSDGSFFLYSKLTVDKSRWQQGNVFSCSVMHEALHNHYTQKSLSLSPGK

SEQ ID NO: 1324 - protein, 248 aa, Artificial; identical to SEQ ID NO: 1309
  Synthetic

SEQ ID NO: 1325 - protein, 248 aa, Artificial; identical to SEQ ID NO: 1310
  Synthetic

SEQ ID NO: 1326 - protein, 248 aa, Artificial; identical to SEQ ID NO: 1311
  Synthetic

SEQ ID NO: 1327 - protein, 248 aa, Artificial; identical to SEQ ID NO: 1312
  Synthetic

SEQ ID NO: 1328 - protein, 248 aa, Artificial; identical to SEQ ID NO: 1313
  Synthetic

SEQ ID NO: 1329 - protein, 248 aa, Artificial; identical to SEQ ID NO: 1314
  Synthetic

SEQ ID NO: 1330 - protein, 248 aa, Artificial; identical to SEQ ID NO: 1315
  Synthetic

SEQ ID NO: 1331 - protein, 248 aa, Artificial; identical to SEQ ID NO: 1316
  Synthetic

SEQ ID NO: 1332 - protein, 248 aa, Artificial; identical to SEQ ID NO: 1317
  Synthetic

SEQ ID NO: 1333 - protein, 248 aa, Artificial; identical to SEQ ID NO: 1318
  Synthetic

SEQ ID NO: 1334 - protein, 248 aa, Artificial; identical to SEQ ID NO: 1319
  Synthetic

SEQ ID NO: 1335 - protein, 248 aa, Artificial; identical to SEQ ID NO: 1320
  Synthetic

SEQ ID NO: 1336 - protein, 248 aa, Artificial; identical to SEQ ID NO: 1321
  Synthetic

SEQ ID NO: 1337 - protein, 248 aa, Artificial; identical to SEQ ID NO: 1322
  Synthetic

SEQ ID NO: 1338 - protein, 248 aa, Artificial; identical to SEQ ID NO: 1323
  Synthetic

SEQ ID NO: 1339 - protein, 248 aa, Artificial; identical to SEQ ID NO: 750
  Synthetic

SEQ ID NO: 1340 - protein, 248 aa, Artificial
  Synthetic
CNVNHKPSNTKVDKKVEPKSCDKTHTCPPCPAPELLGGPDVFLFPPKPKDTLMISRTPEVTCVVVDVEHEDPEVKFNWYVDGVEVHNAKTKPREEQYNSTYRVVSVLTVLHQDWLNGKEYKCKVSNKALPAPEEKTISKAKGQPREPQVYTLPPSRDELTKNQVSLTCLVKGFYPSDIAVEWESNGQPENNYKTTPPVLDSDGSFFLYSKLTVDKSRWQQGNVFSCSVMHEALHNHYTQKSLSLSPGK

SEQ ID NO: 1341 - protein, 248 aa, Artificial
  Synthetic
CNVNHKPSNTKVDKKVEPKSCDKTHTCPPCPAPELLGGPDVFLFPPKPKDTLMISRTPEVTCVVVDVEHEDPEVKFNWYVDGVEVHNAKTKPREEQYNSTYRVVSVLTVLHQDWLNGKEYKCKVSNKALPLPEEKTISKAKGQPREPQVYTLPPSRDELTKNQVSLTCLVKGFYPSDIAVEWESNGQPENNYKTTPPVLDSDGSFFLYSKLTVDKSRWQQGNVFSCSVMHEALHNHYTQKSLSLSPGK

SEQ ID NO: 1342 - protein, 248 aa, Artificial; identical to SEQ ID NO: 670
  Synthetic

SEQ ID NO: 1343 - protein, 248 aa, Artificial; identical to SEQ ID NO: 671
  Synthetic

SEQ ID NO: 1344 - protein, 248 aa, Artificial; identical to SEQ ID NO: 672
  Synthetic

SEQ ID NO: 1345 - protein, 248 aa, Artificial
  Synthetic
CNVNHKPSNTKVDKKVEPKSCDKTHTCPPCPAPELLGGPSVFLFPPKPKDTLMISRTPEVTCVVVDVSHEDPEVKFNWWVDGVRVHNAKTKPREEQYNSTYRVVSVLTVLHQDWLNGKEYKCKVSNKALPAPIEKTISKAKGQPREPQVYTLPPSRDELTKNQVSLTCLVKGFYPSDIAVEWESNGQPENNYKTTPPVLDSDGSFFLYSKLTVDKSRWQQGNVFSCSVMHEALHNHYTQKSLSLSPGK

SEQ ID NO: 1346 - protein, 248 aa, Artificial
  Synthetic
CNVNHKPSNTKVDKKVEPKSCDKTHTCPPCPAPELLGGPSVFLFPPKPKDTLMISRTPEVTCVVVDVSHEDPEVKFNWWVDGVEVHNAKTKPREEQYNSTYRIVSVLTVLHQDWLNGKEYKCKVSNKALPAPIEKTISKAKGQPREPQVYTLPPSRDELTKNQVSLTCLVKGFYPSDIAVEWESNGQPENNYKTTPPVLDSDGSFFLYSKLTVDKSRWQQGNVFSCSVMHEALHNHYTQKSLSLSPGK

SEQ ID NO: 1347 - protein, 248 aa, Artificial
  Synthetic
CNVNHKPSNTKVDKKVEPKSCDKTHTCPPCPAPELLGGPSVFLFPPKPKDTLMISRTPEVTCVVVDVSHEDPEVKFNWWVDGVRVHNAKTKPREEQYNSTYRIVSVLTVLHQDWLNGKEYKCKVSNKALPAPIEKTISKAKGQPREPQVYTLPPSRDELTKNQVSLTCLVKGFYPSDIAVEWESNGQPENNYKTTPPVLDSDGSFFLYSKLTVDKSRWQQGNVFSCSVMHEALHNHYTQKSLSLSPGK

SEQ ID NO: 1348 - protein, 248 aa, Artificial
  Synthetic
CNVNHKPSETKVDKKVEPKSCDKTHTCPPCPAPELLGGPSVFLFPPKPKDTLMISRTPEVTCVVVDVSHEDPEVKFNWYVDGVEVHNAKTKPREEQYNSTYRVVSVLTVLHQDWLNGKEYKCKVSNKALPAPIEKTISKAKGQPREPQVYTLPPSRDELTKNQVSLTCLVKGFYPSDIAVEWESNGQPENNYKTTPPVLDSDGSFFLYSKLTVDKSRWQQGNVFSCSVMHEALHNHYTQKSLSLSPGK

SEQ ID NO: 1349 - protein, 248 aa, Artificial
  Synthetic
CNVNHKPSYTKVDKKVEPKSCDKTHTCPPCPAPELLGGPSVFLFPPKPKDTLMISRTPEVTCVVVDVSHEDPEVKFNWYVDGVEVHNAKTKPREEQYNSTYRVVSVLTVLHQDWLNGKEYKCKVSNKALPAPIEKTISKAKGQPREPQVYTLPPSRDELTKNQVSLTCLVKGFYPSDIAVEWESNGQPENNYKTTPPVLDSDGSFFLYSKLTVDKSRWQQGNVFSCSVMHEALHNHYTQKSLSLSPGK

SEQ ID NO: 1350 - protein, 248 aa, Artificial
  Synthetic
CNVNHKPSNTEVDKKVEPKSCDKTHTCPPCPAPELLGGPSVFLFPPKPKDTLMISRTPEVTCVVVDVSHEDPEVKFNWYVDGVEVHNAKTKPREEQYNSTYRVVSVLTVLHQDWLNGKEYKCKVSNKALPAPIEKTISKAKGQPREPQVYTLPPSRDELTKNQVSLTCLVKGFYPSDIAVEWESNGQPENNYKTTPPVLDSDGSFFLYSKLTVDKSRWQQGNVFSCSVMHEALHNHYTQKSLSLSPGK

SEQ ID NO: 1351 - protein, 248 aa, Artificial
  Synthetic
CNVNHKPSNTYVDKKVEPKSCDKTHTCPPCPAPELLGGPSVFLFPPKPKDTLMISRTPEVTCVVVDVSHEDPEVKFNWYVDGVEVHNAKTKPREEQYNSTYRVVSVLTVLHQDWLNGKEYKCKVSNKALPAPIEKTISKAKGQPREPQVYTLPPSRDELTKNQVSLTCLVKGFYPSDIAVEWESNGQPENNYKTTPPVLDSDGSFFLYSKLTVDKSRWQQGNVFSCSVMHEALHNHYTQKSLSLSPGK

SEQ ID NO: 1352 - protein, 248 aa, Artificial
  Synthetic
CNVNHKPSNTKVQKKVEPKSCDKTHTCPPCPAPELLGGPSVFLFPPKPKDTLMISRTPEVTCVVVDVSHEDPEVKFNWYVDGVEVHNAKTKPREEQYNSTYRVVSVLTVLHQDWLNGKEYKCKVSNKALPAPIEKTISKAKGQPREPQVYTLPPSRDELTKNQVSLTCLVKGFYPSDIAVEWESNGQPENNYKTTPPVLDSDGSFFLYSKLTVDKSRWQQGNVFSCSVMHEALHNHYTQKSLSLSPGK

SEQ ID NO: 1353 - protein, 248 aa, Artificial
  Synthetic
CNVNHKPSNTKVKKKVEPKSCDKTHTCPPCPAPELLGGPSVFLFPPKPKDTLMISRTPEVTCVVVDVSHEDPEVKFNWYVDGVEVHNAKTKPREEQYNSTYRVVSVLTVLHQDWLNGKEYKCKVSNKALPAPIEKTISKAKGQPREPQVYTLPPSRDELTKNQVSLTCLVKGFYPSDIAVEWESNGQPENNYKTTPPVLDSDGSFFLYSKLTVDKSRWQQGNVFSCSVMHEALHNHYTQKSLSLSPGK

SEQ ID NO: 1354 - protein, 248 aa, Artificial
  Synthetic
CNVNHKPSNTKVHKKVEPKSCDKTHTCPPCPAPELLGGPSVFLFPPKPKDTLMISRTPEVTCVVVDVSHEDPEVKFNWYVDGVEVHNAKTKPREEQYNSTYRVVSVLTVLHQDWLNGKEYKCKVSNKALPAPIEKTISKAKGQPREPQVYTLPPSRDELTKNQVSLTCLVKGFYPSDIAVEWESNGQPENNYKTTPPVLDSDGSFFLYSKLTVDKSRWQQGNVFSCSVMHEALHNHYTQKSLSLSPGK

SEQ ID NO: 1355 - protein, 248 aa, Artificial
  Synthetic
CNVNHKPSNTKVLKKVEPKSCDKTHTCPPCPAPELLGGPSVFLFPPKPKDTLMISRTPEVTCVVVDVSHEDPEVKFNWYVDGVEVHNAKTKPREEQYNSTYRVVSVLTVLHQDWLNGKEYKCKVSNKALPAPIEKTISKAKGQPREPQVYTLPPSRDELTKNQVSLTCLVKGFYPSDIAVEWESNGQPENNYKTTPPVLDSDGSFFLYSKLTVDKSRWQQGNVFSCSVMHEALHNHYTQKSLSLSPGK

SEQ ID NO: 1356 - protein, 248 aa, Artificial
  Synthetic
CNVNHKPSNTKVYKKVEPKSCDKTHTCPPCPAPELLGGPSVFLFPPKPKDTLMISRTPEVTCVVVDVSHEDPEVKFNWYVDGVEVHNAKTKPREEQYNSTYRVVSVLTVLHQDWLNGKEYKCKVSNKALPAPIEKTISKAKGQPREPQVYTLPPSRDELTKNQVSLTCLVKGFYPSDIAVEWESNGQPENNYKTTPPVLDSDGSFFLYSKLTVDKSRWQQGNVFSCSVMHEALHNHYTQKSLSLSPGK

SEQ ID NO: 1357 - protein, 248 aa, Artificial
  Synthetic
CNVNHKPSNTKVDNKVEPKSCDKTHTCPPCPAPELLGGPSVFLFPPKPKDTLMISRTPEVTCVVVDVSHEDPEVKFNWYVDGVEVHNAKTKPREEQYNSTYRVVSVLTVLHQDWLNGKEYKCKVSNKALPAPIEKTISKAKGQPREPQVYTLPPSRDELTKNQVSLTCLVKGFYPSDIAVEWESNGQPENNYKTTPPVLDSDGSFFLYSKLTVDKSRWQQGNVFSCSVMHEALHNHYTQKSLSLSPGK

SEQ ID NO: 1358 - protein, 248 aa, Artificial
  Synthetic
CNVNHKPSNTKVDEKVEPKSCDKTHTCPPCPAPELLGGPSVFLFPPKPKDTLMISRTPEVTCVVVDVSHEDPEVKFNWYVDGVEVHNAKTKPREEQYNSTYRVVSVLTVLHQDWLNGKEYKCKVSNKALPAPIEKTISKAKGQPREPQVYTLPPSRDELTKNQVSLTCLVKGFYPSDIAVEWESNGQPENNYKTTPPVLDSDGSFFLYSKLTVDKSRWQQGNVFSCSVMHEALHNHYTQKSLSLSPGK

SEQ ID NO: 1359 - protein, 248 aa, Artificial
  Synthetic
CNVNHKPSNTKVDHKVEPKSCDKTHTCPPCPAPELLGGPSVFLFPPKPKDTLMISRTPEVTCVVVDVSHEDPEVKFNWYVDGVEVHNAKTKPREEQYNSTYRVVSVLTVLHQDWLNGKEYKCKVSNKALPAPIEKTISKAKGQPREPQVYTLPPSRDELTKNQVSLTCLVKGFYPSDIAVEWESNGQPENNYKTTPPVLDSDGSFFLYSKLTVDKSRWQQGNVFSCSVMHEALHNHYTQKSLSLSPGK

SEQ ID NO: 1360 - protein, 248 aa, Artificial
  Synthetic
CNVNHKPSNTKVDLKVEPKSCDKTHTCPPCPAPELLGGPSVFLFPPKPKDTLMISRTPEVTCVVVDVSHEDPEVKFNWYVDGVEVHNAKTKPREEQYNSTYRVVSVLTVLHQDWLNGKEYKCKVSNKALPAPIEKTISKAKGQPREPQVYTLPPSRDELTKNQVSLTCLVKGFYPSDIAVEWESNGQPENNYKTTPPVLDSDGSFFLYSKLTVDKSRWQQGNVFSCSVMHEALHNHYTQKSLSLSPGK

SEQ ID NO: 1361 - protein, 248 aa, Artificial
  Synthetic
CNVNHKPSNTKVDYKVEPKSCDKTHTCPPCPAPELLGGPSVFLFPPKPKDTLMISRTPEVTCVVVDVSHEDPEVKFNWYVDGVEVHNAKTKPREEQYNSTYRVVSVLTVLHQDWLNGKEYKCKVSNKALPAPIEKTISKAKGQPREPQVYTLPPSRDELTKNQVSLTCLVKGFYPSDIAVEWESNGQPENNYKTTPPVLDSDGSFFLYSKLTVDKSRWQQGNVFSCSVMHEALHNHYTQKSLSLSPGK

SEQ ID NO: 1362 - protein, 248 aa, Artificial
  Synthetic
CNVNHKPSNTKVDKNVEPKSCDKTHTCPPCPAPELLGGPSVFLFPPKPKDTLMISRTPEVTCVVVDVSHEDPEVKFNWYVDGVEVHNAKTKPREEQYNSTYRVVSVLTVLHQDWLNGKEYKCKVSNKALPAPIEKTISKAKGQPREPQVYTLPPSRDELTKNQVSLTCLVKGFYPSDIAVEWESNGQPENNYKTTPPVLDSDGSFFLYSKLTVDKSRWQQGNVFSCSVMHEALHNHYTQKSLSLSPGK

SEQ ID NO: 1363 - protein, 248 aa, Artificial
  Synthetic
CNVNHKPSNTKVDKEVEPKSCDKTHTCPPCPAPELLGGPSVFLFPPKPKDTLMISRTPEVTCVVVDVSHEDPEVKFNWYVDGVEVHNAKTKPREEQYNSTYRVVSVLTVLHQDWLNGKEYKCKVSNKALPAPIEKTISKAKGQPREPQVYTLPPSRDELTKNQVSLTCLVKGFYPSDIAVEWESNGQPENNYKTTPPVLDSDGSFFLYSKLTVDKSRWQQGNVFSCSVMHEALHNHYTQKSLSLSPGK

SEQ ID NO: 1364 - protein, 248 aa, Artificial
  Synthetic
CNVNHKPSNTKVDKHVEPKSCDKTHTCPPCPAPELLGGPSVFLFPPKPKDTLMISRTPEVTCVVVDVSHEDPEVKFNWYVDGVEVHNAKTKPREEQYNSTYRVVSVLTVLHQDWLNGKEYKCKVSNKALPAPIEKTISKAKGQPREPQVYTLPPSRDELTKNQVSLTCLVKGFYPSDIAVEWESNGQPENNYKTTPPVLDSDGSFFLYSKLTVDKSRWQQGNVFSCSVMHEALHNHYTQKSLSLSPGK

SEQ ID NO: 1365 - protein, 248 aa, Artificial
  Synthetic
CNVNHKPSNTKVDKLVEPKSCDKTHTCPPCPAPELLGGPSVFLFPPKPKDTLMISRTPEVTCVVVDVSHEDPEVKFNWYVDGVEVHNAKTKPREEQYNSTYRVVSVLTVLHQDWLNGKEYKCKVSNKALPAPIEKTISKAKGQPREPQVYTLPPSRDELTKNQVSLTCLVKGFYPSDIAVEWESNGQPENNYKTTPPVLDSDGSFFLYSKLTVDKSRWQQGNVFSCSVMHEALHNHYTQKSLSLSPGK

SEQ ID NO: 1366 - protein, 248 aa, Artificial
  Synthetic
CNVNHKPSNTKVDKYVEPKSCDKTHTCPPCPAPELLGGPSVFLFPPKPKDTLMISRTPEVTCVVVDVSHEDPEVKFNWYVDGVEVHNAKTKPREEQYNSTYRVVSVLTVLHQDWLNGKEYKCKVSNKALPAPIEKTISKAKGQPREPQVYTLPPSRDELTKNQVSLTCLVKGFYPSDIAVEWESNGQPENNYKTTPPVLDSDGSFFLYSKLTVDKSRWQQGNVFSCSVMHEALHNHYTQKSLSLSPGK

SEQ ID NO: 1367 - protein, 248 aa, Artificial
  Synthetic
CNVNHKPSNTKVDKKVNPKSCDKTHTCPPCPAPELLGGPSVFLFPPKPKDTLMISRTPEVTCVVVDVSHEDPEVKFNWYVDGVEVHNAKTKPREEQYNSTYRVVSVLTVLHQDWLNGKEYKCKVSNKALPAPIEKTISKAKGQPREPQVYTLPPSRDELTKNQVSLTCLVKGFYPSDIAVEWESNGQPENNYKTTPPVLDSDGSFFLYSKLTVDKSRWQQGNVFSCSVMHEALHNHYTQKSLSLSPGK

SEQ ID NO: 1368 - protein, 248 aa, Artificial
  Synthetic
CNVNHKPSNTKVDKKVKPKSCDKTHTCPPCPAPELLGGPSVFLFPPKPKDTLMISRTPEVTCVVVDVSHEDPEVKFNWYVDGVEVHNAKTKPREEQYNSTYRVVSVLTVLHQDWLNGKEYKCKVSNKALPAPIEKTISKAKGQPREPQVYTLPPSRDELTKNQVSLTCLVKGFYPSDIAVEWESNGQPENNYKTTPPVLDSDGSFFLYSKLTVDKSRWQQGNVFSCSVMHEALHNHYTQKSLSLSPGK

SEQ ID NO: 1369 - protein, 248 aa, Artificial
  Synthetic
CNVNHKPSNTKVDKKVHPKSCDKTHTCPPCPAPELLGGPSVFLFPPKPKDTLMISRTPEVTCVVVDVSHEDPEVKFNWYVDGVEVHNAKTKPREEQYNSTYRVVSVLTVLHQDWLNGKEYKCKVSNKALPAPIEKTISKAKGQPREPQVYTLPPSRDELTKNQVSLTCLVKGFYPSDIAVEWESNGQPENNYKTTPPVLDSDGSFFLYSKLTVDKSRWQQGNVFSCSVMHEALHNHYTQKSLSLSPGK

SEQ ID NO: 1370 - protein, 248 aa, Artificial
  Synthetic
CNVNHKPSNTKVDKKVLPKSCDKTHTCPPCPAPELLGGPSVFLFPPKPKDTLMISRTPEVTCVVVDVSHEDPEVKFNWYVDGVEVHNAKTKPREEQYNSTYRVVSVLTVLHQDWLNGKEYKCKVSNKALPAPIEKTISKAKGQPREPQVYTLPPSRDELTKNQVSLTCLVKGFYPSDIAVEWESNGQPENNYKTTPPVLDSDGSFFLYSKLTVDKSRWQQGNVFSCSVMHEALHNHYTQKSLSLSPGK

SEQ ID NO: 1371 - protein, 248 aa, Artificial
  Synthetic
CNVNHKPSNTKVDKKVYPKSCDKTHTCPPCPAPELLGGPSVFLFPPKPKDTLMISRTPEVTCVVVDVSHEDPEVKFNWYVDGVEVHNAKTKPREEQYNSTYRVVSVLTVLHQDWLNGKEYKCKVSNKALPAPIEKTISKAKGQPREPQVYTLPPSRDELTKNQVSLTCLVKGFYPSDIAVEWESNGQPENNYKTTPPVLDSDGSFFLYSKLTVDKSRWQQGNVFSCSVMHEALHNHYTQKSLSLSPGK

SEQ ID NO: 1372 - protein, 248 aa, Artificial
  Synthetic
CNVNHKPSNTKVDKKVEDKSCDKTHTCPPCPAPELLGGPSVFLFPPKPKDTLMISRTPEVTCVVVDVSHEDPEVKFNWYVDGVEVHNAKTKPREEQYNSTYRVVSVLTVLHQDWLNGKEYKCKVSNKALPAPIEKTISKAKGQPREPQVYTLPPSRDELTKNQVSLTCLVKGFYPSDIAVEWESNGQPENNYKTTPPVLDSDGSFFLYSKLTVDKSRWQQGNVFSCSVMHEALHNHYTQKSLSLSPGK

SEQ ID NO: 1373 - protein, 248 aa, Artificial
  Synthetic
CNVNHKPSNTKVDKKVEHKSCDKTHTCPPCPAPELLGGPSVFLFPPKPKDTLMISRTPEVTCVVVDVSHEDPEVKFNWYVDGVEVHNAKTKPREEQYNSTYRVVSVLTVLHQDWLNGKEYKCKVSNKALPAPIEKTISKAKGQPREPQVYTLPPSRDELTKNQVSLTCLVKGFYPSDIAVEWESNGQPENNYKTTPPVLDSDGSFFLYSKLTVDKSRWQQGNVFSCSVMHEALHNHYTQKSLSLSPGK

SEQ ID NO: 1374 - protein, 248 aa, Artificial
  Synthetic
CNVNHKPSNTKVDKKVEAKSCDKTHTCPPCPAPELLGGPSVFLFPPKPKDTLMISRTPEVTCVVVDVSHEDPEVKFNWYVDGVEVHNAKTKPREEQYNSTYRVVSVLTVLHQDWLNGKEYKCKVSNKALPAPIEKTISKAKGQPREPQVYTLPPSRDELTKNQVSLTCLVKGFYPSDIAVEWESNGQPENNYKTTPPVLDSDGSFFLYSKLTVDKSRWQQGNVFSCSVMHEALHNHYTQKSLSLSPGK

SEQ ID NO: 1375 - protein, 248 aa, Artificial
  Synthetic
CNVNHKPSNTKVDKKVEVKSCDKTHTCPPCPAPELLGGPSVFLFPPKPKDTLMISRTPEVTCVVVDVSHEDPEVKFNWYVDGVEVHNAKTKPREEQYNSTYRVVSVLTVLHQDWLNGKEYKCKVSNKALPAPIEKTISKAKGQPREPQVYTLPPSRDELTKNQVSLTCLVKGFYPSDIAVEWESNGQPENNYKTTPPVLDSDGSFFLYSKLTVDKSRWQQGNVFSCSVMHEALHNHYTQKSLSLSPGK

SEQ ID NO: 1376 - protein, 248 aa, Artificial
  Synthetic
CNVNHKPSNTKVDKKVEGKSCDKTHTCPPCPAPELLGGPSVFLFPPKPKDTLMISRTPEVTCVVVDVSHEDPEVKFNWYVDGVEVHNAKTKPREEQYNSTYRVVSVLTVLHQDWLNGKEYKCKVSNKALPAPIEKTISKAKGQPREPQVYTLPPSRDELTKNQVSLTCLVKGFYPSDIAVEWESNGQPENNYKTTPPVLDSDGSFFLYSKLTVDKSRWQQGNVFSCSVMHEALHNHYTQKSLSLSPGK

SEQ ID NO: 1377 - protein, 248 aa, Artificial
  Synthetic
CNVNHKPSNTKVDKKVEPDSCDKTHTCPPCPAPELLGGPSVFLFPPKPKDTLMISRTPEVTCVVVDVSHEDPEVKFNWYVDGVEVHNAKTKPREEQYNSTYRVVSVLTVLHQDWLNGKEYKCKVSNKALPAPIEKTISKAKGQPREPQVYTLPPSRDELTKNQVSLTCLVKGFYPSDIAVEWESNGQPENNYKTTPPVLDSDGSFFLYSKLTVDKSRWQQGNVFSCSVMHEALHNHYTQKSLSLSPGK

SEQ ID NO: 1378 - protein, 248 aa, Artificial
  Synthetic
CNVNHKPSNTKVDKKVEPESCDKTHTCPPCPAPELLGGPSVFLFPPKPKDTLMISRTPEVTCVVVDVSHEDPEVKFNWYVDGVEVHNAKTKPREEQYNSTYRVVSVLTVLHQDWLNGKEYKCKVSNKALPAPIEKTISKAKGQPREPQVYTLPPSRDELTKNQVSLTCLVKGFYPSDIAVEWESNGQPENNYKTTPPVLDSDGSFFLYSKLTVDKSRWQQGNVFSCSVMHEALHNHYTQKSLSLSPGK

SEQ ID NO: 1379 - protein, 248 aa, Artificial
  Synthetic
CNVNHKPSNTKVDKKVEPQSCDKTHTCPPCPAPELLGGPSVFLFPPKPKDTLMISRTPEVTCVVVDVSHEDPEVKFNWYVDGVEVHNAKTKPREEQYNSTYRVVSVLTVLHQDWLNGKEYKCKVSNKALPAPIEKTISKAKGQPREPQVYTLPPSRDELTKNQVSLTCLVKGFYPSDIAVEWESNGQPENNYKTTPPVLDSDGSFFLYSKLTVDKSRWQQGNVFSCSVMHEALHNHYTQKSLSLSPGK

SEQ ID NO: 1380 - protein, 248 aa, Artificial
  Synthetic
CNVNHKPSNTKVDKKVEPTSCDKTHTCPPCPAPELLGGPSVFLFPPKPKDTLMISRTPEVTCVVVDVSHEDPEVKFNWYVDGVEVHNAKTKPREEQYNSTYRVVSVLTVLHQDWLNGKEYKCKVSNKALPAPIEKTISKAKGQPREPQVYTLPPSRDELTKNQVSLTCLVKGFYPSDIAVEWESNGQPENNYKTTPPVLDSDGSFFLYSKLTVDKSRWQQGNVFSCSVMHEALHNHYTQKSLSLSPGK

SEQ ID NO: 1381 - protein, 248 aa, Artificial
  Synthetic
CNVNHKPSNTKVDKKVEPHSCDKTHTCPPCPAPELLGGPSVFLFPPKPKDTLMISRTPEVTCVVVDVSHEDPEVKFNWYVDGVEVHNAKTKPREEQYNSTYRVVSVLTVLHQDWLNGKEYKCKVSNKALPAPIEKTISKAKGQPREPQVYTLPPSRDELTKNQVSLTCLVKGFYPSDIAVEWESNGQPENNYKTTPPVLDSDGSFFLYSKLTVDKSRWQQGNVFSCSVMHEALHNHYTQKSLSLSPGK

SEQ ID NO: 1382 - protein, 248 aa, Artificial
  Synthetic
CNVNHKPSNTKVDKKVEPLSCDKTHTCPPCPAPELLGGPSVFLFPPKPKDTLMISRTPEVTCVVVDVSHEDPEVKFNWYVDGVEVHNAKTKPREEQYNSTYRVVSVLTVLHQDWLNGKEYKCKVSNKALPAPIEKTISKAKGQPREPQVYTLPPSRDELTKNQVSLTCLVKGFYPSDIAVEWESNGQPENNYKTTPPVLDSDGSFFLYSKLTVDKSRWQQGNVFSCSVMHEALHNHYTQKSLSLSPGK

SEQ ID NO: 1383 - protein, 248 aa, Artificial
  Synthetic
CNVNHKPSNTKVDKKVEPYSCDKTHTCPPCPAPELLGGPSVFLFPPKPKDTLMISRTPEVTCVVVDVSHEDPEVKFNWYVDGVEVHNAKTKPREEQYNSTYRVVSVLTVLHQDWLNGKEYKCKVSNKALPAPIEKTISKAKGQPREPQVYTLPPSRDELTKNQVSLTCLVKGFYPSDIAVEWESNGQPENNYKTTPPVLDSDGSFFLYSKLTVDKSRWQQGNVFSCSVMHEALHNHYTQKSLSLSPGK

SEQ ID NO: 1384 - protein, 248 aa, Artificial
  Synthetic
CNVNHKPSNTKVDKKVEPKDCDKTHTCPPCPAPELLGGPSVFLFPPKPKDTLMISRTPEVTCVVVDVSHEDPEVKFNWYVDGVEVHNAKTKPREEQYNSTYRVVSVLTVLHQDWLNGKEYKCKVSNKALPAPIEKTISKAKGQPREPQVYTLPPSRDELTKNQVSLTCLVKGFYPSDIAVEWESNGQPENNYKTTPPVLDSDGSFFLYSKLTVDKSRWQQGNVFSCSVMHEALHNHYTQKSLSLSPGK

SEQ ID NO: 1385 - protein, 248 aa, Artificial
  Synthetic
CNVNHKPSNTKVDKKVEPKECDKTHTCPPCPAPELLGGPSVFLFPPKPKDTLMISRTPEVTCVVVDVSHEDPEVKFNWYVDGVEVHNAKTKPREEQYNSTYRVVSVLTVLHQDWLNGKEYKCKVSNKALPAPIEKTISKAKGQPREPQVYTLPPSRDELTKNQVSLTCLVKGFYPSDIAVEWESNGQPENNYKTTPPVLDSDGSFFLYSKLTVDKSRWQQGNVFSCSVMHEALHNHYTQKSLSLSPGK

SEQ ID NO: 1386 - protein, 248 aa, Artificial
  Synthetic
CNVNHKPSNTKVDKKVEPKQCDKTHTCPPCPAPELLGGPSVFLFPPKPKDTLMISRTPEVTCVVVDVSHEDPEVKFNWYVDGVEVHNAKTKPREEQYNSTYRVVSVLTVLHQDWLNGKEYKCKVSNKALPAPIEKTISKAKGQPREPQVYTLPPSRDELTKNQVSLTCLVKGFYPSDIAVEWESNGQPENNYKTTPPVLDSDGSFFLYSKLTVDKSRWQQGNVFSCSVMHEALHNHYTQKSLSLSPGK

SEQ ID NO: 1387 - protein, 248 aa, Artificial
  Synthetic
CNVNHKPSNTKVDKKVEPKKCDKTHTCPPCPAPELLGGPSVFLFPPKPKDTLMISRTPEVTCVVVDVSHEDPEVKFNWYVDGVEVHNAKTKPREEQYNSTYRVVSVLTVLHQDWLNGKEYKCKVSNKALPAPIEKTISKAKGQPREPQVYTLPPSRDELTKNQVSLTCLVKGFYPSDIAVEWESNGQPENNYKTTPPVLDSDGSFFLYSKLTVDKSRWQQGNVFSCSVMHEALHNHYTQKSLSLSPGK

SEQ ID NO: 1388 - protein, 248 aa, Artificial
  Synthetic
CNVNHKPSNTKVDKKVEPKTCDKTHTCPPCPAPELLGGPSVFLFPPKPKDTLMISRTPEVTCVVVDVSHEDPEVKFNWYVDGVEVHNAKTKPREEQYNSTYRVVSVLTVLHQDWLNGKEYKCKVSNKALPAPIEKTISKAKGQPREPQVYTLPPSRDELTKNQVSLTCLVKGFYPSDIAVEWESNGQPENNYKTTPPVLDSDGSFFLYSKLTVDKSRWQQGNVFSCSVMHEALHNHYTQKSLSLSPGK

SEQ ID NO: 1389 - protein, 248 aa, Artificial
  Synthetic
CNVNHKPSNTKVDKKVEPKHCDKTHTCPPCPAPELLGGPSVFLFPPKPKDTLMISRTPEVTCVVVDVSHEDPEVKFNWYVDGVEVHNAKTKPREEQYNSTYRVVSVLTVLHQDWLNGKEYKCKVSNKALPAPIEKTISKAKGQPREPQVYTLPPSRDELTKNQVSLTCLVKGFYPSDIAVEWESNGQPENNYKTTPPVLDSDGSFFLYSKLTVDKSRWQQGNVFSCSVMHEALHNHYTQKSLSLSPGK

SEQ ID NO: 1390 - protein, 248 aa, Artificial
  Synthetic
CNVNHKPSNTKVDKKVEPKLCDKTHTCPPCPAPELLGGPSVFLFPPKPKDTLMISRTPEVTCVVVDVSHEDPEVKFNWYVDGVEVHNAKTKPREEQYNSTYRVVSVLTVLHQDWLNGKEYKCKVSNKALPAPIEKTISKAKGQPREPQVYTLPPSRDELTKNQVSLTCLVKGFYPSDIAVEWESNGQPENNYKTTPPVLDSDGSFFLYSKLTVDKSRWQQGNVFSCSVMHEALHNHYTQKSLSLSPGK

SEQ ID NO: 1391 - protein, 248 aa, Artificial
  Synthetic
CNVNHKPSNTKVDKKVEPKICDKTHTCPPCPAPELLGGPSVFLFPPKPKDTLMISRTPEVTCVVVDVSHEDPEVKFNWYVDGVEVHNAKTKPREEQYNSTYRVVSVLTVLHQDWLNGKEYKCKVSNKALPAPIEKTISKAKGQPREPQVYTLPPSRDELTKNQVSLTCLVKGFYPSDIAVEWESNGQPENNYKTTPPVLDSDGSFFLYSKLTVDKSRWQQGNVFSCSVMHEALHNHYTQKSLSLSPGK

SEQ ID NO: 1392 - protein, 248 aa, Artificial
  Synthetic
CNVNHKPSNTKVDKKVEPKYCDKTHTCPPCPAPELLGGPSVFLFPPKPKDTLMISRTPEVTCVVVDVSHEDPEVKFNWYVDGVEVHNAKTKPREEQYNSTYRVVSVLTVLHQDWLNGKEYKCKVSNKALPAPIEKTISKAKGQPREPQVYTLPPSRDELTKNQVSLTCLVKGFYPSDIAVEWESNGQPENNYKTTPPVLDSDGSFFLYSKLTVDKSRWQQGNVFSCSVMHEALHNHYTQKSLSLSPGK

SEQ ID NO: 1393 - protein, 248 aa, Artificial
  Synthetic
CNVNHKPSNTKVDKKVEPKSCEKTHTCPPCPAPELLGGPSVFLFPPKPKDTLMISRTPEVTCVVVDVSHEDPEVKFNWYVDGVEVHNAKTKPREEQYNSTYRVVSVLTVLHQDWLNGKEYKCKVSNKALPAPIEKTISKAKGQPREPQVYTLPPSRDELTKNQVSLTCLVKGFYPSDIAVEWESNGQPENNYKTTPPVLDSDGSFFLYSKLTVDKSRWQQGNVFSCSVMHEALHNHYTQKSLSLSPGK

SEQ ID NO: 1394 - protein, 248 aa, Artificial
  Synthetic
CNVNHKPSNTKVDKKVEPKSCNKTHTCPPCPAPELLGGPSVFLFPPKPKDTLMISRTPEVTCVVVDVSHEDPEVKFNWYVDGVEVHNAKTKPREEQYNSTYRVVSVLTVLHQDWLNGKEYKCKVSNKALPAPIEKTISKAKGQPREPQVYTLPPSRDELTKNQVSLTCLVKGFYPSDIAVEWESNGQPENNYKTTPPVLDSDGSFFLYSKLTVDKSRWQQGNVFSCSVMHEALHNHYTQKSLSLSPGK

SEQ ID NO: 1395 - protein, 248 aa, Artificial
  Synthetic
CNVNHKPSNTKVDKKVEPKSCQKTHTCPPCPAPELLGGPSVFLFPPKPKDTLMISRTPEVTCVVVDVSHEDPEVKFNWYVDGVEVHNAKTKPREEQYNSTYRVVSVLTVLHQDWLNGKEYKCKVSNKALPAPIEKTISKAKGQPREPQVYTLPPSRDELTKNQVSLTCLVKGFYPSDIAVEWESNGQPENNYKTTPPVLDSDGSFFLYSKLTVDKSRWQQGNVFSCSVMHEALHNHYTQKSLSLSPGK

SEQ ID NO: 1396 - protein, 248 aa, Artificial
  Synthetic
CNVNHKPSNTKVDKKVEPKSCRKTHTCPPCPAPELLGGPSVFLFPPKPKDTLMISRTPEVTCVVVDVSHEDPEVKFNWYVDGVEVHNAKTKPREEQYNSTYRVVSVLTVLHQDWLNGKEYKCKVSNKALPAPIEKTISKAKGQPREPQVYTLPPSRDELTKNQVSLTCLVKGFYPSDIAVEWESNGQPENNYKTTPPVLDSDGSFFLYSKLTVDKSRWQQGNVFSCSVMHEALHNHYTQKSLSLSPGK

SEQ ID NO: 1397 - protein, 248 aa, Artificial
  Synthetic
CNVNHKPSNTKVDKKVEPKSCSKTHTCPPCPAPELLGGPSVFLFPPKPKDTLMISRTPEVTCVVVDVSHEDPEVKFNWYVDGVEVHNAKTKPREEQYNSTYRVVSVLTVLHQDWLNGKEYKCKVSNKALPAPIEKTISKAKGQPREPQVYTLPPSRDELTKNQVSLTCLVKGFYPSDIAVEWESNGQPENNYKTTPPVLDSDGSFFLYSKLTVDKSRWQQGNVFSCSVMHEALHNHYTQKSLSLSPGK

SEQ ID NO: 1398 - protein, 248 aa, Artificial
  Synthetic
CNVNHKPSNTKVDKKVEPKSCTKTHTCPPCPAPELLGGPSVFLFPPKPKDTLMISRTPEVTCVVVDVSHEDPEVKFNWYVDGVEVHNAKTKPREEQYNSTYRVVSVLTVLHQDWLNGKEYKCKVSNKALPAPIEKTISKAKGQPREPQVYTLPPSRDELTKNQVSLTCLVKGFYPSDIAVEWESNGQPENNYKTTPPVLDSDGSFFLYSKLTVDKSRWQQGNVFSCSVMHEALHNHYTQKSLSLSPGK

SEQ ID NO: 1399 - protein, 248 aa, Artificial
  Synthetic
CNVNHKPSNTKVDKKVEPKSCHKTHTCPPCPAPELLGGPSVFLFPPKPKDTLMISRTPEVTCVVVDVSHEDPEVKFNWYVDGVEVHNAKTKPREEQYNSTYRVVSVLTVLHQDWLNGKEYKCKVSNKALPAPIEKTISKAKGQPREPQVYTLPPSRDELTKNQVSLTCLVKGFYPSDIAVEWESNGQPENNYKTTPPVLDSDGSFFLYSKLTVDKSRWQQGNVFSCSVMHEALHNHYTQKSLSLSPGK

SEQ ID NO: 1400 - protein, 248 aa, Artificial
  Synthetic
CNVNHKPSNTKVDKKVEPKSCAKTHTCPPCPAPELLGGPSVFLFPPKPKDTLMISRTPEVTCVVVDVSHEDPEVKFNWYVDGVEVHNAKTKPREEQYNSTYRVVSVLTVLHQDWLNGKEYKCKVSNKALPAPIEKTISKAKGQPREPQVYTLPPSRDELTKNQVSLTCLVKGFYPSDIAVEWESNGQPENNYKTTPPVLDSDGSFFLYSKLTVDKSRWQQGNVFSCSVMHEALHNHYTQKSLSLSPGK

SEQ ID NO: 1401 - protein, 248 aa, Artificial
  Synthetic
CNVNHKPSNTKVDKKVEPKSCVKTHTCPPCPAPELLGGPSVFLFPPKPKDTLMISRTPEVTCVVVDVSHEDPEVKFNWYVDGVEVHNAKTKPREEQYNSTYRVVSVLTVLHQDWLNGKEYKCKVSNKALPAPIEKTISKAKGQPREPQVYTLPPSRDELTKNQVSLTCLVKGFYPSDIAVEWESNGQPENNYKTTPPVLDSDGSFFLYSKLTVDKSRWQQGNVFSCSVMHEALHNHYTQKSLSLSPGK

SEQ ID NO: 1402 - protein, 248 aa, Artificial
  Synthetic
CNVNHKPSNTKVDKKVEPKSCLKTHTCPPCPAPELLGGPSVFLFPPKPKDTLMISRTPEVTCVVVDVSHEDPEVKFNWYVDGVEVHNAKTKPREEQYNSTYRVVSVLTVLHQDWLNGKEYKCKVSNKALPAPIEKTISKAKGQPREPQVYTLPPSRDELTKNQVSLTCLVKGFYPSDIAVEWESNGQPENNYKTTPPVLDSDGSFFLYSKLTVDKSRWQQGNVFSCSVMHEALHNHYTQKSLSLSPGK

SEQ ID NO: 1403 - protein, 248 aa, Artificial
  Synthetic
CNVNHKPSNTKVDKKVEPKSCIKTHTCPPCPAPELLGGPSVFLFPPKPKDTLMISRTPEVTCVVVDVSHEDPEVKFNWYVDGVEVHNAKTKPREEQYNSTYRVVSVLTVLHQDWLNGKEYKCKVSNKALPAPIEKTISKAKGQPREPQVYTLPPSRDELTKNQVSLTCLVKGFYPSDIAVEWESNGQPENNYKTTPPVLDSDGSFFLYSKLTVDKSRWQQGNVFSCSVMHEALHNHYTQKSLSLSPGK

SEQ ID NO: 1404 - protein, 248 aa, Artificial
  Synthetic
CNVNHKPSNTKVDKKVEPKSCFKTHTCPPCPAPELLGGPSVFLFPPKPKDTLMISRTPEVTCVVVDVSHEDPEVKFNWYVDGVEVHNAKTKPREEQYNSTYRVVSVLTVLHQDWLNGKEYKCKVSNKALPAPIEKTISKAKGQPREPQVYTLPPSRDELTKNQVSLTCLVKGFYPSDIAVEWESNGQPENNYKTTPPVLDSDGSFFLYSKLTVDKSRWQQGNVFSCSVMHEALHNHYTQKSLSLSPGK

SEQ ID NO: 1405 - protein, 248 aa, Artificial
  Synthetic
CNVNHKPSNTKVDKKVEPKSCMKTHTCPPCPAPELLGGPSVFLFPPKPKDTLMISRTPEVTCVVVDVSHEDPEVKFNWYVDGVEVHNAKTKPREEQYNSTYRVVSVLTVLHQDWLNGKEYKCKVSNKALPAPIEKTISKAKGQPREPQVYTLPPSRDELTKNQVSLTCLVKGFYPSDIAVEWESNGQPENNYKTTPPVLDSDGSFFLYSKLTVDKSRWQQGNVFSCSVMHEALHNHYTQKSLSLSPGK

SEQ ID NO: 1406 - protein, 248 aa, Artificial
  Synthetic
CNVNHKPSNTKVDKKVEPKSCWKTHTCPPCPAPELLGGPSVFLFPPKPKDTLMISRTPEVTCVVVDVSHEDPEVKFNWYVDGVEVHNAKTKPREEQYNSTYRVVSVLTVLHQDWLNGKEYKCKVSNKALPAPIEKTISKAKGQPREPQVYTLPPSRDELTKNQVSLTCLVKGFYPSDIAVEWESNGQPENNYKTTPPVLDSDGSFFLYSKLTVDKSRWQQGNVFSCSVMHEALHNHYTQKSLSLSPGK

SEQ ID NO: 1407 - protein, 248 aa, Artificial
  Synthetic
CNVNHKPSNTKVDKKVEPKSCPKTHTCPPCPAPELLGGPSVFLFPPKPKDTLMISRTPEVTCVVVDVSHEDPEVKFNWYVDGVEVHNAKTKPREEQYNSTYRVVSVLTVLHQDWLNGKEYKCKVSNKALPAPIEKTISKAKGQPREPQVYTLPPSRDELTKNQVSLTCLVKGFYPSDIAVEWESNGQPENNYKTTPPVLDSDGSFFLYSKLTVDKSRWQQGNVFSCSVMHEALHNHYTQKSLSLSPGK

SEQ ID NO: 1408 - protein, 248 aa, Artificial
  Synthetic
CNVNHKPSNTKVDKKVEPKSCGKTHTCPPCPAPELLGGPSVFLFPPKPKDTLMISRTPEVTCVVVDVSHEDPEVKFNWYVDGVEVHNAKTKPREEQYNSTYRVVSVLTVLHQDWLNGKEYKCKVSNKALPAPIEKTISKAKGQPREPQVYTLPPSRDELTKNQVSLTCLVKGFYPSDIAVEWESNGQPENNYKTTPPVLDSDGSFFLYSKLTVDKSRWQQGNVFSCSVMHEALHNHYTQKSLSLSPGK

SEQ ID NO: 1409 - protein, 248 aa, Artificial
  Synthetic
CNVNHKPSNTKVDKKVEPKSCDDTHTCPPCPAPELLGGPSVFLFPPKPKDTLMISRTPEVTCVVVDVSHEDPEVKFNWYVDGVEVHNAKTKPREEQYNSTYRVVSVLTVLHQDWLNGKEYKCKVSNKALPAPIEKTISKAKGQPREPQVYTLPPSRDELTKNQVSLTCLVKGFYPSDIAVEWESNGQPENNYKTTPPVLDSDGSFFLYSKLTVDKSRWQQGNVFSCSVMHEALHNHYTQKSLSLSPGK

SEQ ID NO: 1410 - protein, 248 aa, Artificial
  Synthetic
CNVNHKPSNTKVDKKVEPKSCDNTHTCPPCPAPELLGGPSVFLFPPKPKDTLMISRTPEVTCVVVDVSHEDPEVKFNWYVDGVEVHNAKTKPREEQYNSTYRVVSVLTVLHQDWLNGKEYKCKVSNKALPAPIEKTISKAKGQPREPQVYTLPPSRDELTKNQVSLTCLVKGFYPSDIAVEWESNGQPENNYKTTPPVLDSDGSFFLYSKLTVDKSRWQQGNVFSCSVMHEALHNHYTQKSLSLSPGK

SEQ ID NO: 1411 - protein, 248 aa, Artificial
  Synthetic
CNVNHKPSNTKVDKKVEPKSCDQTHTCPPCPAPELLGGPSVFLFPPKPKDTLMISRTPEVTCVVVDVSHEDPEVKFNWYVDGVEVHNAKTKPREEQYNSTYRVVSVLTVLHQDWLNGKEYKCKVSNKALPAPIEKTISKAKGQPREPQVYTLPPSRDELTKNQVSLTCLVKGFYPSDIAVEWESNGQPENNYKTTPPVLDSDGSFFLYSKLTVDKSRWQQGNVFSCSVMHEALHNHYTQKSLSLSPGK

SEQ ID NO: 1412 - protein, 248 aa, Artificial
  Synthetic
CNVNHKPSNTKVDKKVEPKSCDRTHTCPPCPAPELLGGPSVFLFPPKPKDTLMISRTPEVTCVVVDVSHEDPEVKFNWYVDGVEVHNAKTKPREEQYNSTYRVVSVLTVLHQDWLNGKEYKCKVSNKALPAPIEKTISKAKGQPREPQVYTLPPSRDELTKNQVSLTCLVKGFYPSDIAVEWESNGQPENNYKTTPPVLDSDGSFFLYSKLTVDKSRWQQGNVFSCSVMHEALHNHYTQKSLSLSPGK

SEQ ID NO: 1413 - protein, 248 aa, Artificial
  Synthetic
CNVNHKPSNTKVDKKVEPKSCDSTHTCPPCPAPELLGGPSVFLFPPKPKDTLMISRTPEVTCVVVDVSHEDPEVKFNWYVDGVEVHNAKTKPREEQYNSTYRVVSVLTVLHQDWLNGKEYKCKVSNKALPAPIEKTISKAKGQPREPQVYTLPPSRDELTKNQVSLTCLVKGFYPSDIAVEWESNGQPENNYKTTPPVLDSDGSFFLYSKLTVDKSRWQQGNVFSCSVMHEALHNHYTQKSLSLSPGK

SEQ ID NO: 1414 - protein, 248 aa, Artificial
  Synthetic
CNVNHKPSNTKVDKKVEPKSCDTTHTCPPCPAPELLGGPSVFLFPPKPKDTLMISRTPEVTCVVVDVSHEDPEVKFNWYVDGVEVHNAKTKPREEQYNSTYRVVSVLTVLHQDWLNGKEYKCKVSNKALPAPIEKTISKAKGQPREPQVYTLPPSRDELTKNQVSLTCLVKGFYPSDIAVEWESNGQPENNYKTTPPVLDSDGSFFLYSKLTVDKSRWQQGNVFSCSVMHEALHNHYTQKSLSLSPGK

SEQ ID NO: 1415 - protein, 248 aa, Artificial
  Synthetic
CNVNHKPSNTKVDKKVEPKSCDHTHTCPPCPAPELLGGPSVFLFPPKPKDTLMISRTPEVTCVVVDVSHEDPEVKFNWYVDGVEVHNAKTKPREEQYNSTYRVVSVLTVLHQDWLNGKEYKCKVSNKALPAPIEKTISKAKGQPREPQVYTLPPSRDELTKNQVSLTCLVKGFYPSDIAVEWESNGQPENNYKTTPPVLDSDGSFFLYSKLTVDKSRWQQGNVFSCSVMHEALHNHYTQKSLSLSPGK

SEQ ID NO: 1416 - protein, 248 aa, Artificial
  Synthetic
CNVNHKPSNTKVDKKVEPKSCDVTHTCPPCPAPELLGGPSVFLFPPKPKDTLMISRTPEVTCVVVDVSHEDPEVKFNWYVDGVEVHNAKTKPREEQYNSTYRVVSVLTVLHQDWLNGKEYKCKVSNKALPAPIEKTISKAKGQPREPQVYTLPPSRDELTKNQVSLTCLVKGFYPSDIAVEWESNGQPENNYKTTPPVLDSDGSFFLYSKLTVDKSRWQQGNVFSCSVMHEALHNHYTQKSLSLSPGK

SEQ ID NO: 1417 - protein, 248 aa, Artificial
  Synthetic
CNVNHKPSNTKVDKKVEPKSCDLTHTCPPCPAPELLGGPSVFLFPPKPKDTLMISRTPEVTCVVVDVSHEDPEVKFNWYVDGVEVHNAKTKPREEQYNSTYRVVSVLTVLHQDWLNGKEYKCKVSNKALPAPIEKTISKAKGQPREPQVYTLPPSRDELTKNQVSLTCLVKGFYPSDIAVEWESNGQPENNYKTTPPVLDSDGSFFLYSKLTVDKSRWQQGNVFSCSVMHEALHNHYTQKSLSLSPGK

SEQ ID NO: 1418 - protein, 248 aa, Artificial
  Synthetic
CNVNHKPSNTKVDKKVEPKSCDITHTCPPCPAPELLGGPSVFLFPPKPKDTLMISRTPEVTCVVVDVSHEDPEVKFNWYVDGVEVHNAKTKPREEQYNSTYRVVSVLTVLHQDWLNGKEYKCKVSNKALPAPIEKTISKAKGQPREPQVYTLPPSRDELTKNQVSLTCLVKGFYPSDIAVEWESNGQPENNYKTTPPVLDSDGSFFLYSKLTVDKSRWQQGNVFSCSVMHEALHNHYTQKSLSLSPGK

SEQ ID NO: 1419 - protein, 248 aa, Artificial
  Synthetic
CNVNHKPSNTKVDKKVEPKSCDFTHTCPPCPAPELLGGPSVFLFPPKPKDTLMISRTPEVTCVVVDVSHEDPEVKFNWYVDGVEVHNAKTKPREEQYNSTYRVVSVLTVLHQDWLNGKEYKCKVSNKALPAPIEKTISKAKGQPREPQVYTLPPSRDELTKNQVSLTCLVKGFYPSDIAVEWESNGQPENNYKTTPPVLDSDGSFFLYSKLTVDKSRWQQGNVFSCSVMHEALHNHYTQKSLSLSPGK

SEQ ID NO: 1420 - protein, 248 aa, Artificial
  Synthetic
CNVNHKPSNTKVDKKVEPKSCDMTHTCPPCPAPELLGGPSVFLFPPKPKDTLMISRTPEVTCVVVDVSHEDPEVKFNWYVDGVEVHNAKTKPREEQYNSTYRVVSVLTVLHQDWLNGKEYKCKVSNKALPAPIEKTISKAKGQPREPQVYTLPPSRDELTKNQVSLTCLVKGFYPSDIAVEWESNGQPENNYKTTPPVLDSDGSFFLYSKLTVDKSRWQQGNVFSCSVMHEALHNHYTQKSLSLSPGK

SEQ ID NO: 1421 - protein, 248 aa, Artificial
  Synthetic
CNVNHKPSNTKVDKKVEPKSCDWTHTCPPCPAPELLGGPSVFLFPPKPKDTLMISRTPEVTCVVVDVSHEDPEVKFNWYVDGVEVHNAKTKPREEQYNSTYRVVSVLTVLHQDWLNGKEYKCKVSNKALPAPIEKTISKAKGQPREPQVYTLPPSRDELTKNQVSLTCLVKGFYPSDIAVEWESNGQPENNYKTTPPVLDSDGSFFLYSKLTVDKSRWQQGNVFSCSVMHEALHNHYTQKSLSLSPGK

SEQ ID NO: 1422 - protein, 248 aa, Artificial
  Synthetic
CNVNHKPSNTKVDKKVEPKSCDPTHTCPPCPAPELLGGPSVFLFPPKPKDTLMISRTPEVTCVVVDVSHEDPEVKFNWYVDGVEVHNAKTKPREEQYNSTYRVVSVLTVLHQDWLNGKEYKCKVSNKALPAPIEKTISKAKGQPREPQVYTLPPSRDELTKNQVSLTCLVKGFYPSDIAVEWESNGQPENNYKTTPPVLDSDGSFFLYSKLTVDKSRWQQGNVFSCSVMHEALHNHYTQKSLSLSPGK

SEQ ID NO: 1423 - protein, 248 aa, Artificial
  Synthetic
CNVNHKPSNTKVDKKVEPKSCDGTHTCPPCPAPELLGGPSVFLFPPKPKDTLMISRTPEVTCVVVDVSHEDPEVKFNWYVDGVEVHNAKTKPREEQYNSTYRVVSVLTVLHQDWLNGKEYKCKVSNKALPAPIEKTISKAKGQPREPQVYTLPPSRDELTKNQVSLTCLVKGFYPSDIAVEWESNGQPENNYKTTPPVLDSDGSFFLYSKLTVDKSRWQQGNVFSCSVMHEALHNHYTQKSLSLSPGK

SEQ ID NO: 1424 - protein, 248 aa, Artificial
  Synthetic
CNVNHKPSNTKVDKKVEPKSCDKDHTCPPCPAPELLGGPSVFLFPPKPKDTLMISRTPEVTCVVVDVSHEDPEVKFNWYVDGVEVHNAKTKPREEQYNSTYRVVSVLTVLHQDWLNGKEYKCKVSNKALPAPIEKTISKAKGQPREPQVYTLPPSRDELTKNQVSLTCLVKGFYPSDIAVEWESNGQPENNYKTTPPVLDSDGSFFLYSKLTVDKSRWQQGNVFSCSVMHEALHNHYTQKSLSLSPGK

SEQ ID NO: 1425 - protein, 248 aa, Artificial
  Synthetic
CNVNHKPSNTKVDKKVEPKSCDKNHTCPPCPAPELLGGPSVFLFPPKPKDTLMISRTPEVTCVVVDVSHEDPEVKFNWYVDGVEVHNAKTKPREEQYNSTYRVVSVLTVLHQDWLNGKEYKCKVSNKALPAPIEKTISKAKGQPREPQVYTLPPSRDELTKNQVSLTCLVKGFYPSDIAVEWESNGQPENNYKTTPPVLDSDGSFFLYSKLTVDKSRWQQGNVFSCSVMHEALHNHYTQKSLSLSPGK

SEQ ID NO: 1426 - protein, 248 aa, Artificial
  Synthetic
CNVNHKPSNTKVDKKVEPKSCDKQHTCPPCPAPELLGGPSVFLFPPKPKDTLMISRTPEVTCVVVDVSHEDPEVKFNWYVDGVEVHNAKTKPREEQYNSTYRVVSVLTVLHQDWLNGKEYKCKVSNKALPAPIEKTISKAKGQPREPQVYTLPPSRDELTKNQVSLTCLVKGFYPSDIAVEWESNGQPENNYKTTPPVLDSDGSFFLYSKLTVDKSRWQQGNVFSCSVMHEALHNHYTQKSLSLSPGK

SEQ ID NO: 1427 - protein, 248 aa, Artificial
  Synthetic
CNVNHKPSNTKVDKKVEPKSCDKRHTCPPCPAPELLGGPSVFLFPPKPKDTLMISRTPEVTCVVVDVSHEDPEVKFNWYVDGVEVHNAKTKPREEQYNSTYRVVSVLTVLHQDWLNGKEYKCKVSNKALPAPIEKTISKAKGQPREPQVYTLPPSRDELTKNQVSLTCLVKGFYPSDIAVEWESNGQPENNYKTTPPVLDSDGSFFLYSKLTVDKSRWQQGNVFSCSVMHEALHNHYTQKSLSLSPGK

SEQ ID NO: 1428 - protein, 248 aa, Artificial
  Synthetic
CNVNHKPSNTKVDKKVEPKSCDKSHTCPPCPAPELLGGPSVFLFPPKPKDTLMISRTPEVTCVVVDVSHEDPEVKFNWYVDGVEVHNAKTKPREEQYNSTYRVVSVLTVLHQDWLNGKEYKCKVSNKALPAPIEKTISKAKGQPREPQVYTLPPSRDELTKNQVSLTCLVKGFYPSDIAVEWESNGQPENNYKTTPPVLDSDGSFFLYSKLTVDKSRWQQGNVFSCSVMHEALHNHYTQKSLSLSPGK

SEQ ID NO: 1429 - protein, 248 aa, Artificial
  Synthetic
CNVNHKPSNTKVDKKVEPKSCDKHHTCPPCPAPELLGGPSVFLFPPKPKDTLMISRTPEVTCVVVDVSHEDPEVKFNWYVDGVEVHNAKTKPREEQYNSTYRVVSVLTVLHQDWLNGKEYKCKVSNKALPAPIEKTISKAKGQPREPQVYTLPPSRDELTKNQVSLTCLVKGFYPSDIAVEWESNGQPENNYKTTPPVLDSDGSFFLYSKLTVDKSRWQQGNVFSCSVMHEALHNHYTQKSLSLSPGK

SEQ ID NO: 1430 - protein, 248 aa, Artificial
  Synthetic
CNVNHKPSNTKVDKKVEPKSCDKAHTCPPCPAPELLGGPSVFLFPPKPKDTLMISRTPEVTCVVVDVSHEDPEVKFNWYVDGVEVHNAKTKPREEQYNSTYRVVSVLTVLHQDWLNGKEYKCKVSNKALPAPIEKTISKAKGQPREPQVYTLPPSRDELTKNQVSLTCLVKGFYPSDIAVEWESNGQPENNYKTTPPVLDSDGSFFLYSKLTVDKSRWQQGNVFSCSVMHEALHNHYTQKSLSLSPGK

SEQ ID NO: 1431 - protein, 248 aa, Artificial
  Synthetic
CNVNHKPSNTKVDKKVEPKSCDKVHTCPPCPAPELLGGPSVFLFPPKPKDTLMISRTPEVTCVVVDVSHEDPEVKFNWYVDGVEVHNAKTKPREEQYNSTYRVVSVLTVLHQDWLNGKEYKCKVSNKALPAPIEKTISKAKGQPREPQVYTLPPSRDELTKNQVSLTCLVKGFYPSDIAVEWESNGQPENNYKTTPPVLDSDGSFFLYSKLTVDKSRWQQGNVFSCSVMHEALHNHYTQKSLSLSPGK

SEQ ID NO: 1432 - protein, 248 aa, Artificial
  Synthetic
CNVNHKPSNTKVDKKVEPKSCDKLHTCPPCPAPELLGGPSVFLFPPKPKDTLMISRTPEVTCVVVDVSHEDPEVKFNWYVDGVEVHNAKTKPREEQYNSTYRVVSVLTVLHQDWLNGKEYKCKVSNKALPAPIEKTISKAKGQPREPQVYTLPPSRDELTKNQVSLTCLVKGFYPSDIAVEWESNGQPENNYKTTPPVLDSDGSFFLYSKLTVDKSRWQQGNVFSCSVMHEALHNHYTQKSLSLSPGK

SEQ ID NO: 1433 - protein, 248 aa, Artificial
  Synthetic
CNVNHKPSNTKVDKKVEPKSCDKIHTCPPCPAPELLGGPSVFLFPPKPKDTLMISRTPEVTCVVVDVSHEDPEVKFNWYVDGVEVHNAKTKPREEQYNSTYRVVSVLTVLHQDWLNGKEYKCKVSNKALPAPIEKTISKAKGQPREPQVYTLPPSRDELTKNQVSLTCLVKGFYPSDIAVEWESNGQPENNYKTTPPVLDSDGSFFLYSKLTVDKSRWQQGNVFSCSVMHEALHNHYTQKSLSLSPGK

SEQ ID NO: 1434 - protein, 248 aa, Artificial
  Synthetic
CNVNHKPSNTKVDKKVEPKSCDKFHTCPPCPAPELLGGPSVFLFPPKPKDTLMISRTPEVTCVVVDVSHEDPEVKFNWYVDGVEVHNAKTKPREEQYNSTYRVVSVLTVLHQDWLNGKEYKCKVSNKALPAPIEKTISKAKGQPREPQVYTLPPSRDELTKNQVSLTCLVKGFYPSDIAVEWESNGQPENNYKTTPPVLDSDGSFFLYSKLTVDKSRWQQGNVFSCSVMHEALHNHYTQKSLSLSPGK

SEQ ID NO: 1435 - protein, 248 aa, Artificial
  Synthetic
CNVNHKPSNTKVDKKVEPKSCDKMHTCPPCPAPELLGGPSVFLFPPKPKDTLMISRTPEVTCVVVDVSHEDPEVKFNWYVDGVEVHNAKTKPREEQYNSTYRVVSVLTVLHQDWLNGKEYKCKVSNKALPAPIEKTISKAKGQPREPQVYTLPPSRDELTKNQVSLTCLVKGFYPSDIAVEWESNGQPENNYKTTPPVLDSDGSFFLYSKLTVDKSRWQQGNVFSCSVMHEALHNHYTQKSLSLSPGK

SEQ ID NO: 1436 - protein, 248 aa, Artificial
  Synthetic
CNVNHKPSNTKVDKKVEPKSCDKYHTCPPCPAPELLGGPSVFLFPPKPKDTLMISRTPEVTCVVVDVSHEDPEVKFNWYVDGVEVHNAKTKPREEQYNSTYRVVSVLTVLHQDWLNGKEYKCKVSNKALPAPIEKTISKAKGQPREPQVYTLPPSRDELTKNQVSLTCLVKGFYPSDIAVEWESNGQPENNYKTTPPVLDSDGSFFLYSKLTVDKSRWQQGNVFSCSVMHEALHNHYTQKSLSLSPGK

SEQ ID NO: 1437 - protein, 248 aa, Artificial
  Synthetic
CNVNHKPSNTKVDKKVEPKSCDKWHTCPPCPAPELLGGPSVFLFPPKPKDTLMISRTPEVTCVVVDVSHEDPEVKFNWYVDGVEVHNAKTKPREEQYNSTYRVVSVLTVLHQDWLNGKEYKCKVSNKALPAPIEKTISKAKGQPREPQVYTLPPSRDELTKNQVSLTCLVKGFYPSDIAVEWESNGQPENNYKTTPPVLDSDGSFFLYSKLTVDKSRWQQGNVFSCSVMHEALHNHYTQKSLSLSPGK

SEQ ID NO: 1438 - protein, 248 aa, Artificial
  Synthetic
CNVNHKPSNTKVDKKVEPKSCDKPHTCPPCPAPELLGGPSVFLFPPKPKDTLMISRTPEVTCVVVDVSHEDPEVKFNWYVDGVEVHNAKTKPREEQYNSTYRVVSVLTVLHQDWLNGKEYKCKVSNKALPAPIEKTISKAKGQPREPQVYTLPPSRDELTKNQVSLTCLVKGFYPSDIAVEWESNGQPENNYKTTPPVLDSDGSFFLYSKLTVDKSRWQQGNVFSCSVMHEALHNHYTQKSLSLSPGK

SEQ ID NO: 1439 - protein, 248 aa, Artificial
  Synthetic
CNVNHKPSNTKVDKKVEPKSCDKGHTCPPCPAPELLGGPSVFLFPPKPKDTLMISRTPEVTCVVVDVSHEDPEVKFNWYVDGVEVHNAKTKPREEQYNSTYRVVSVLTVLHQDWLNGKEYKCKVSNKALPAPIEKTISKAKGQPREPQVYTLPPSRDELTKNQVSLTCLVKGFYPSDIAVEWESNGQPENNYKTTPPVLDSDGSFFLYSKLTVDKSRWQQGNVFSCSVMHEALHNHYTQKSLSLSPGK

SEQ ID NO: 1440 - protein, 248 aa, Artificial
  Synthetic
CNVNHKPSNTKVDKKVEPKSCDKTDTCPPCPAPELLGGPSVFLFPPKPKDTLMISRTPEVTCVVVDVSHEDPEVKFNWYVDGVEVHNAKTKPREEQYNSTYRVVSVLTVLHQDWLNGKEYKCKVSNKALPAPIEKTISKAKGQPREPQVYTLPPSRDELTKNQVSLTCLVKGFYPSDIAVEWESNGQPENNYKTTPPVLDSDGSFFLYSKLTVDKSRWQQGNVFSCSVMHEALHNHYTQKSLSLSPGK

SEQ ID NO: 1441 - protein, 248 aa, Artificial
  Synthetic
CNVNHKPSNTKVDKKVEPKSCDKTNTCPPCPAPELLGGPSVFLFPPKPKDTLMISRTPEVTCVVVDVSHEDPEVKFNWYVDGVEVHNAKTKPREEQYNSTYRVVSVLTVLHQDWLNGKEYKCKVSNKALPAPIEKTISKAKGQPREPQVYTLPPSRDELTKNQVSLTCLVKGFYPSDIAVEWESNGQPENNYKTTPPVLDSDGSFFLYSKLTVDKSRWQQGNVFSCSVMHEALHNHYTQKSLSLSPGK

SEQ ID NO: 1442 - protein, 248 aa, Artificial
  Synthetic
CNVNHKPSNTKVDKKVEPKSCDKTQTCPPCPAPELLGGPSVFLFPPKPKDTLMISRTPEVTCVVVDVSHEDPEVKFNWYVDGVEVHNAKTKPREEQYNSTYRVVSVLTVLHQDWLNGKEYKCKVSNKALPAPIEKTISKAKGQPREPQVYTLPPSRDELTKNQVSLTCLVKGFYPSDIAVEWESNGQPENNYKTTPPVLDSDGSFFLYSKLTVDKSRWQQGNVFSCSVMHEALHNHYTQKSLSLSPGK

SEQ ID NO: 1443 - protein, 248 aa, Artificial
  Synthetic
CNVNHKPSNTKVDKKVEPKSCDKTKTCPPCPAPELLGGPSVFLFPPKPKDTLMISRTPEVTCVVVDVSHEDPEVKFNWYVDGVEVHNAKTKPREEQYNSTYRVVSVLTVLHQDWLNGKEYKCKVSNKALPAPIEKTISKAKGQPREPQVYTLPPSRDELTKNQVSLTCLVKGFYPSDIAVEWESNGQPENNYKTTPPVLDSDGSFFLYSKLTVDKSRWQQGNVFSCSVMHEALHNHYTQKSLSLSPGK

SEQ ID NO: 1444 - protein, 248 aa, Artificial
  Synthetic
CNVNHKPSNTKVDKKVEPKSCDKTRTCPPCPAPELLGGPSVFLFPPKPKDTLMISRTPEVTCVVVDVSHEDPEVKFNWYVDGVEVHNAKTKPREEQYNSTYRVVSVLTVLHQDWLNGKEYKCKVSNKALPAPIEKTISKAKGQPREPQVYTLPPSRDELTKNQVSLTCLVKGFYPSDIAVEWESNGQPENNYKTTPPVLDSDGSFFLYSKLTVDKSRWQQGNVFSCSVMHEALHNHYTQKSLSLSPGK

SEQ ID NO: 1445 - protein, 248 aa, Artificial
  Synthetic
CNVNHKPSNTKVDKKVEPKSCDKTSTCPPCPAPELLGGPSVFLFPPKPKDTLMISRTPEVTCVVVDVSHEDPEVKFNWYVDGVEVHNAKTKPREEQYNSTYRVVSVLTVLHQDWLNGKEYKCKVSNKALPAPIEKTISKAKGQPREPQVYTLPPSRDELTKNQVSLTCLVKGFYPSDIAVEWESNGQPENNYKTTPPVLDSDGSFFLYSKLTVDKSRWQQGNVFSCSVMHEALHNHYTQKSLSLSPGK

SEQ ID NO: 1446 - protein, 248 aa, Artificial
  Synthetic
CNVNHKPSNTKVDKKVEPKSCDKTTTCPPCPAPELLGGPSVFLFPPKPKDTLMISRTPEVTCVVVDVSHEDPEVKFNWYVDGVEVHNAKTKPREEQYNSTYRVVSVLTVLHQDWLNGKEYKCKVSNKALPAPIEKTISKAKGQPREPQVYTLPPSRDELTKNQVSLTCLVKGFYPSDIAVEWESNGQPENNYKTTPPVLDSDGSFFLYSKLTVDKSRWQQGNVFSCSVMHEALHNHYTQKSLSLSPGK

SEQ ID NO: 1447 - protein, 248 aa, Artificial
  Synthetic
CNVNHKPSNTKVDKKVEPKSCDKTVTCPPCPAPELLGGPSVFLFPPKPKDTLMISRTPEVTCVVVDVSHEDPEVKFNWYVDGVEVHNAKTKPREEQYNSTYRVVSVLTVLHQDWLNGKEYKCKVSNKALPAPIEKTISKAKGQPREPQVYTLPPSRDELTKNQVSLTCLVKGFYPSDIAVEWESNGQPENNYKTTPPVLDSDGSFFLYSKLTVDKSRWQQGNVFSCSVMHEALHNHYTQKSLSLSPGK

SEQ ID NO: 1448 - protein, 248 aa, Artificial
  Synthetic
CNVNHKPSNTKVDKKVEPKSCDKTLTCPPCPAPELLGGPSVFLFPPKPKDTLMISRTPEVTCVVVDVSHEDPEVKFNWYVDGVEVHNAKTKPREEQYNSTYRVVSVLTVLHQDWLNGKEYKCKVSNKALPAPIEKTISKAKGQPREPQVYTLPPSRDELTKNQVSLTCLVKGFYPSDIAVEWESNGQPENNYKTTPPVLDSDGSFFLYSKLTVDKSRWQQGNVFSCSVMHEALHNHYTQKSLSLSPGK

SEQ ID NO: 1449 - protein, 248 aa, Artificial
  Synthetic
CNVNHKPSNTKVDKKVEPKSCDKTITCPPCPAPELLGGPSVFLFPPKPKDTLMISRTPEVTCVVVDVSHEDPEVKFNWYVDGVEVHNAKTKPREEQYNSTYRVVSVLTVLHQDWLNGKEYKCKVSNKALPAPIEKTISKAKGQPREPQVYTLPPSRDELTKNQVSLTCLVKGFYPSDIAVEWESNGQPENNYKTTPPVLDSDGSFFLYSKLTVDKSRWQQGNVFSCSVMHEALHNHYTQKSLSLSPGK

SEQ ID NO: 1450 - protein, 248 aa, Artificial
  Synthetic
CNVNHKPSNTKVDKKVEPKSCDKTFTCPPCPAPELLGGPSVFLFPPKPKDTLMISRTPEVTCVVVDVSHEDPEVKFNWYVDGVEVHNAKTKPREEQYNSTYRVVSVLTVLHQDWLNGKEYKCKVSNKALPAPIEKTISKAKGQPREPQVYTLPPSRDELTKNQVSLTCLVKGFYPSDIAVEWESNGQPENNYKTTPPVLDSDGSFFLYSKLTVDKSRWQQGNVFSCSVMHEALHNHYTQKSLSLSPGK

SEQ ID NO: 1451 - protein, 248 aa, Artificial
  Synthetic
CNVNHKPSNTKVDKKVEPKSCDKTMTCPPCPAPELLGGPSVFLFPPKPKDTLMISRTPEVTCVVVDVSHEDPEVKFNWYVDGVEVHNAKTKPREEQYNSTYRVVSVLTVLHQDWLNGKEYKCKVSNKALPAPIEKTISKAKGQPREPQVYTLPPSRDELTKNQVSLTCLVKGFYPSDIAVEWESNGQPENNYKTTPPVLDSDGSFFLYSKLTVDKSRWQQGNVFSCSVMHEALHNHYTQKSLSLSPGK

SEQ ID NO: 1452 - protein, 248 aa, Artificial
  Synthetic
CNVNHKPSNTKVDKKVEPKSCDKTWTCPPCPAPELLGGPSVFLFPPKPKDTLMISRTPEVTCVVVDVSHEDPEVKFNWYVDGVEVHNAKTKPREEQYNSTYRVVSVLTVLHQDWLNGKEYKCKVSNKALPAPIEKTISKAKGQPREPQVYTLPPSRDELTKNQVSLTCLVKGFYPSDIAVEWESNGQPENNYKTTPPVLDSDGSFFLYSKLTVDKSRWQQGNVFSCSVMHEALHNHYTQKSLSLSPGK

SEQ ID NO: 1453 - protein, 248 aa, Artificial
  Synthetic
CNVNHKPSNTKVDKKVEPKSCDKTPTCPPCPAPELLGGPSVFLFPPKPKDTLMISRTPEVTCVVVDVSHEDPEVKFNWYVDGVEVHNAKTKPREEQYNSTYRVVSVLTVLHQDWLNGKEYKCKVSNKALPAPIEKTISKAKGQPREPQVYTLPPSRDELTKNQVSLTCLVKGFYPSDIAVEWESNGQPENNYKTTPPVLDSDGSFFLYSKLTVDKSRWQQGNVFSCSVMHEALHNHYTQKSLSLSPGK

SEQ ID NO: 1454 - protein, 248 aa, Artificial
  Synthetic
CNVNHKPSNTKVDKKVEPKSCDKTGTCPPCPAPELLGGPSVFLFPPKPKDTLMISRTPEVTCVVVDVSHEDPEVKFNWYVDGVEVHNAKTKPREEQYNSTYRVVSVLTVLHQDWLNGKEYKCKVSNKALPAPIEKTISKAKGQPREPQVYTLPPSRDELTKNQVSLTCLVKGFYPSDIAVEWESNGQPENNYKTTPPVLDSDGSFFLYSKLTVDKSRWQQGNVFSCSVMHEALHNHYTQKSLSLSPGK

SEQ ID NO: 1455 - protein, 248 aa, Artificial
  Synthetic
CNVNHKPSNTKVDKKVEPKSCDKTHDCPPCPAPELLGGPSVFLFPPKPKDTLMISRTPEVTCVVVDVSHEDPEVKFNWYVDGVEVHNAKTKPREEQYNSTYRVVSVLTVLHQDWLNGKEYKCKVSNKALPAPIEKTISKAKGQPREPQVYTLPPSRDELTKNQVSLTCLVKGFYPSDIAVEWESNGQPENNYKTTPPVLDSDGSFFLYSKLTVDKSRWQQGNVFSCSVMHEALHNHYTQKSLSLSPGK

SEQ ID NO: 1456 - protein, 248 aa, Artificial
  Synthetic
CNVNHKPSNTKVDKKVEPKSCDKTHNCPPCPAPELLGGPSVFLFPPKPKDTLMISRTPEVTCVVVDVSHEDPEVKFNWYVDGVEVHNAKTKPREEQYNSTYRVVSVLTVLHQDWLNGKEYKCKVSNKALPAPIEKTISKAKGQPREPQVYTLPPSRDELTKNQVSLTCLVKGFYPSDIAVEWESNGQPENNYKTTPPVLDSDGSFFLYSKLTVDKSRWQQGNVFSCSVMHEALHNHYTQKSLSLSPGK

SEQ ID NO: 1457 - protein, 248 aa, Artificial
  Synthetic
CNVNHKPSNTKVDKKVEPKSCDKTHQCPPCPAPELLGGPSVFLFPPKPKDTLMISRTPEVTCVVVDVSHEDPEVKFNWYVDGVEVHNAKTKPREEQYNSTYRVVSVLTVLHQDWLNGKEYKCKVSNKALPAPIEKTISKAKGQPREPQVYTLPPSRDELTKNQVSLTCLVKGFYPSDIAVEWESNGQPENNYKTTPPVLDSDGSFFLYSKLTVDKSRWQQGNVFSCSVMHEALHNHYTQKSLSLSPGK

SEQ ID NO: 1458 - protein, 248 aa, Artificial
  Synthetic
CNVNHKPSNTKVDKKVEPKSCDKTHRCPPCPAPELLGGPSVFLFPPKPKDTLMISRTPEVTCVVVDVSHEDPEVKFNWYVDGVEVHNAKTKPREEQYNSTYRVVSVLTVLHQDWLNGKEYKCKVSNKALPAPIEKTISKAKGQPREPQVYTLPPSRDELTKNQVSLTCLVKGFYPSDIAVEWESNGQPENNYKTTPPVLDSDGSFFLYSKLTVDKSRWQQGNVFSCSVMHEALHNHYTQKSLSLSPGK

SEQ ID NO: 1459 - protein, 248 aa, Artificial
  Synthetic
CNVNHKPSNTKVDKKVEPKSCDKTHSCPPCPAPELLGGPSVFLFPPKPKDTLMISRTPEVTCVVVDVSHEDPEVKFNWYVDGVEVHNAKTKPREEQYNSTYRVVSVLTVLHQDWLNGKEYKCKVSNKALPAPIEKTISKAKGQPREPQVYTLPPSRDELTKNQVSLTCLVKGFYPSDIAVEWESNGQPENNYKTTPPVLDSDGSFFLYSKLTVDKSRWQQGNVFSCSVMHEALHNHYTQKSLSLSPGK

SEQ ID NO: 1460 - protein, 248 aa, Artificial
  Synthetic
CNVNHKPSNTKVDKKVEPKSCDKTHHCPPCPAPELLGGPSVFLFPPKPKDTLMISRTPEVTCVVVDVSHEDPEVKFNWYVDGVEVHNAKTKPREEQYNSTYRVVSVLTVLHQDWLNGKEYKCKVSNKALPAPIEKTISKAKGQPREPQVYTLPPSRDELTKNQVSLTCLVKGFYPSDIAVEWESNGQPENNYKTTPPVLDSDGSFFLYSKLTVDKSRWQQGNVFSCSVMHEALHNHYTQKSLSLSPGK

SEQ ID NO: 1461 - protein, 248 aa, Artificial
  Synthetic
CNVNHKPSNTKVDKKVEPKSCDKTHACPPCPAPELLGGPSVFLFPPKPKDTLMISRTPEVTCVVVDVSHEDPEVKFNWYVDGVEVHNAKTKPREEQYNSTYRVVSVLTVLHQDWLNGKEYKCKVSNKALPAPIEKTISKAKGQPREPQVYTLPPSRDELTKNQVSLTCLVKGFYPSDIAVEWESNGQPENNYKTTPPVLDSDGSFFLYSKLTVDKSRWQQGNVFSCSVMHEALHNHYTQKSLSLSPGK

SEQ ID NO: 1462 - protein, 248 aa, Artificial
  Synthetic
CNVNHKPSNTKVDKKVEPKSCDKTHVCPPCPAPELLGGPSVFLFPPKPKDTLMISRTPEVTCVVVDVSHEDPEVKFNWYVDGVEVHNAKTKPREEQYNSTYRVVSVLTVLHQDWLNGKEYKCKVSNKALPAPIEKTISKAKGQPREPQVYTLPPSRDELTKNQVSLTCLVKGFYPSDIAVEWESNGQPENNYKTTPPVLDSDGSFFLYSKLTVDKSRWQQGNVFSCSVMHEALHNHYTQKSLSLSPGK

SEQ ID NO: 1463 - protein, 248 aa, Artificial
  Synthetic
CNVNHKPSNTKVDKKVEPKSCDKTHLCPPCPAPELLGGPSVFLFPPKPKDTLMISRTPEVTCVVVDVSHEDPEVKFNWYVDGVEVHNAKTKPREEQYNSTYRVVSVLTVLHQDWLNGKEYKCKVSNKALPAPIEKTISKAKGQPREPQVYTLPPSRDELTKNQVSLTCLVKGFYPSDIAVEWESNGQPENNYKTTPPVLDSDGSFFLYSKLTVDKSRWQQGNVFSCSVMHEALHNHYTQKSLSLSPGK

SEQ ID NO: 1464 - protein, 248 aa, Artificial
  Synthetic
CNVNHKPSNTKVDKKVEPKSCDKTHICPPCPAPELLGGPSVFLFPPKPKDTLMISRTPEVTCVVVDVSHEDPEVKFNWYVDGVEVHNAKTKPREEQYNSTYRVVSVLTVLHQDWLNGKEYKCKVSNKALPAPIEKTISKAKGQPREPQVYTLPPSRDELTKNQVSLTCLVKGFYPSDIAVEWESNGQPENNYKTTPPVLDSDGSFFLYSKLTVDKSRWQQGNVFSCSVMHEALHNHYTQKSLSLSPGK

SEQ ID NO: 1465 - protein, 248 aa, Artificial
  Synthetic
CNVNHKPSNTKVDKKVEPKSCDKTHFCPPCPAPELLGGPSVFLFPPKPKDTLMISRTPEVTCVVVDVSHEDPEVKFNWYVDGVEVHNAKTKPREEQYNSTYRVVSVLTVLHQDWLNGKEYKCKVSNKALPAPIEKTISKAKGQPREPQVYTLPPSRDELTKNQVSLTCLVKGFYPSDIAVEWESNGQPENNYKTTPPVLDSDGSFFLYSKLTVDKSRWQQGNVFSCSVMHEALHNHYTQKSLSLSPGK

SEQ ID NO: 1466 - protein, 248 aa, Artificial
  Synthetic
CNVNHKPSNTKVDKKVEPKSCDKTHMCPPCPAPELLGGPSVFLFPPKPKDTLMISRTPEVTCVVVDVSHEDPEVKFNWYVDGVEVHNAKTKPREEQYNSTYRVVSVLTVLHQDWLNGKEYKCKVSNKALPAPIEKTISKAKGQPREPQVYTLPPSRDELTKNQVSLTCLVKGFYPSDIAVEWESNGQPENNYKTTPPVLDSDGSFFLYSKLTVDKSRWQQGNVFSCSVMHEALHNHYTQKSLSLSPGK

SEQ ID NO: 1467 - protein, 248 aa, Artificial
  Synthetic
CNVNHKPSNTKVDKKVEPKSCDKTHYCPPCPAPELLGGPSVFLFPPKPKDTLMISRTPEVTCVVVDVSHEDPEVKFNWYVDGVEVHNAKTKPREEQYNSTYRVVSVLTVLHQDWLNGKEYKCKVSNKALPAPIEKTISKAKGQPREPQVYTLPPSRDELTKNQVSLTCLVKGFYPSDIAVEWESNGQPENNYKTTPPVLDSDGSFFLYSKLTVDKSRWQQGNVFSCSVMHEALHNHYTQKSLSLSPGK

SEQ ID NO: 1468 - protein, 248 aa, Artificial
  Synthetic
CNVNHKPSNTKVDKKVEPKSCDKTHPCPPCPAPELLGGPSVFLFPPKPKDTLMISRTPEVTCVVVDVSHEDPEVKFNWYVDGVEVHNAKTKPREEQYNSTYRVVSVLTVLHQDWLNGKEYKCKVSNKALPAPIEKTISKAKGQPREPQVYTLPPSRDELTKNQVSLTCLVKGFYPSDIAVEWESNGQPENNYKTTPPVLDSDGSFFLYSKLTVDKSRWQQGNVFSCSVMHEALHNHYTQKSLSLSPGK

SEQ ID NO: 1469 - protein, 248 aa, Artificial
  Synthetic
CNVNHKPSNTKVDKKVEPKSCDKTHGCPPCPAPELLGGPSVFLFPPKPKDTLMISRTPEVTCVVVDVSHEDPEVKFNWYVDGVEVHNAKTKPREEQYNSTYRVVSVLTVLHQDWLNGKEYKCKVSNKALPAPIEKTISKAKGQPREPQVYTLPPSRDELTKNQVSLTCLVKGFYPSDIAVEWESNGQPENNYKTTPPVLDSDGSFFLYSKLTVDKSRWQQGNVFSCSVMHEALHNHYTQKSLSLSPGK

SEQ ID NO: 1470 - protein, 248 aa, Artificial
  Synthetic
CNVNHKPSNTKVDKKVEPKSCDKTHTSPPCPAPELLGGPSVFLFPPKPKDTLMISRTPEVTCVVVDVSHEDPEVKFNWYVDGVEVHNAKTKPREEQYNSTYRVVSVLTVLHQDWLNGKEYKCKVSNKALPAPIEKTISKAKGQPREPQVYTLPPSRDELTKNQVSLTCLVKGFYPSDIAVEWESNGQPENNYKTTPPVLDSDGSFFLYSKLTVDKSRWQQGNVFSCSVMHEALHNHYTQKSLSLSPGK

SEQ ID NO: 1471 - protein, 248 aa, Artificial
  Synthetic
CNVNHKPSNTKVDKKVEPKSCDKTHTCDPCPAPELLGGPSVFLFPPKPKDTLMISRTPEVTCVVVDVSHEDPEVKFNWYVDGVEVHNAKTKPREEQYNSTYRVVSVLTVLHQDWLNGKEYKCKVSNKALPAPIEKTISKAKGQPREPQVYTLPPSRDELTKNQVSLTCLVKGFYPSDIAVEWESNGQPENNYKTTPPVLDSDGSFFLYSKLTVDKSRWQQGNVFSCSVMHEALHNHYTQKSLSLSPGK

SEQ ID NO: 1472 - protein, 248 aa, Artificial
  Synthetic
CNVNHKPSNTKVDKKVEPKSCDKTHTCNPCPAPELLGGPSVFLFPPKPKDTLMISRTPEVTCVVVDVSHEDPEVKFNWYVDGVEVHNAKTKPREEQYNSTYRVVSVLTVLHQDWLNGKEYKCKVSNKALPAPIEKTISKAKGQPREPQVYTLPPSRDELTKNQVSLTCLVKGFYPSDIAVEWESNGQPENNYKTTPPVLDSDGSFFLYSKLTVDKSRWQQGNVFSCSVMHEALHNHYTQKSLSLSPGK

SEQ ID NO: 1473 - protein, 248 aa, Artificial
  Synthetic
CNVNHKPSNTKVDKKVEPKSCDKTHTCQPCPAPELLGGPSVFLFPPKPKDTLMISRTPEVTCVVVDVSHEDPEVKFNWYVDGVEVHNAKTKPREEQYNSTYRVVSVLTVLHQDWLNGKEYKCKVSNKALPAPIEKTISKAKGQPREPQVYTLPPSRDELTKNQVSLTCLVKGFYPSDIAVEWESNGQPENNYKTTPPVLDSDGSFFLYSKLTVDKSRWQQGNVFSCSVMHEALHNHYTQKSLSLSPGK

SEQ ID NO: 1474 - protein, 248 aa, Artificial
  Synthetic
CNVNHKPSNTKVDKKVEPKSCDKTHTCRPCPAPELLGGPSVFLFPPKPKDTLMISRTPEVTCVVVDVSHEDPEVKFNWYVDGVEVHNAKTKPREEQYNSTYRVVSVLTVLHQDWLNGKEYKCKVSNKALPAPIEKTISKAKGQPREPQVYTLPPSRDELTKNQVSLTCLVKGFYPSDIAVEWESNGQPENNYKTTPPVLDSDGSFFLYSKLTVDKSRWQQGNVFSCSVMHEALHNHYTQKSLSLSPGK

SEQ ID NO: 1475 - protein, 248 aa, Artificial
  Synthetic
CNVNHKPSNTKVDKKVEPKSCDKTHTCSPCPAPELLGGPSVFLFPPKPKDTLMISRTPEVTCVVVDVSHEDPEVKFNWYVDGVEVHNAKTKPREEQYNSTYRVVSVLTVLHQDWLNGKEYKCKVSNKALPAPIEKTISKAKGQPREPQVYTLPPSRDELTKNQVSLTCLVKGFYPSDIAVEWESNGQPENNYKTTPPVLDSDGSFFLYSKLTVDKSRWQQGNVFSCSVMHEALHNHYTQKSLSLSPGK

SEQ ID NO: 1476 - protein, 248 aa, Artificial
  Synthetic
CNVNHKPSNTKVDKKVEPKSCDKTHTCTPCPAPELLGGPSVFLFPPKPKDTLMISRTPEVTCVVVDVSHEDPEVKFNWYVDGVEVHNAKTKPREEQYNSTYRVVSVLTVLHQDWLNGKEYKCKVSNKALPAPIEKTISKAKGQPREPQVYTLPPSRDELTKNQVSLTCLVKGFYPSDIAVEWESNGQPENNYKTTPPVLDSDGSFFLYSKLTVDKSRWQQGNVFSCSVMHEALHNHYTQKSLSLSPGK

SEQ ID NO: 1477 - protein, 248 aa, Artificial
  Synthetic
CNVNHKPSNTKVDKKVEPKSCDKTHTCHPCPAPELLGGPSVFLFPPKPKDTLMISRTPEVTCVVVDVSHEDPEVKFNWYVDGVEVHNAKTKPREEQYNSTYRVVSVLTVLHQDWLNGKEYKCKVSNKALPAPIEKTISKAKGQPREPQVYTLPPSRDELTKNQVSLTCLVKGFYPSDIAVEWESNGQPENNYKTTPPVLDSDGSFFLYSKLTVDKSRWQQGNVFSCSVMHEALHNHYTQKSLSLSPGK

SEQ ID NO: 1478 - protein, 248 aa, Artificial
  Synthetic
CNVNHKPSNTKVDKKVEPKSCDKTHTCAPCPAPELLGGPSVFLFPPKPKDTLMISRTPEVTCVVVDVSHEDPEVKFNWYVDGVEVHNAKTKPREEQYNSTYRVVSVLTVLHQDWLNGKEYKCKVSNKALPAPIEKTISKAKGQPREPQVYTLPPSRDELTKNQVSLTCLVKGFYPSDIAVEWESNGQPENNYKTTPPVLDSDGSFFLYSKLTVDKSRWQQGNVFSCSVMHEALHNHYTQKSLSLSPGK

SEQ ID NO: 1479 - protein, 248 aa, Artificial
  Synthetic
CNVNHKPSNTKVDKKVEPKSCDKTHTCVPCPAPELLGGPSVFLFPPKPKDTLMISRTPEVTCVVVDVSHEDPEVKFNWYVDGVEVHNAKTKPREEQYNSTYRVVSVLTVLHQDWLNGKEYKCKVSNKALPAPIEKTISKAKGQPREPQVYTLPPSRDELTKNQVSLTCLVKGFYPSDIAVEWESNGQPENNYKTTPPVLDSDGSFFLYSKLTVDKSRWQQGNVFSCSVMHEALHNHYTQKSLSLSPGK

SEQ ID NO: 1480 - protein, 248 aa, Artificial
  Synthetic
CNVNHKPSNTKVDKKVEPKSCDKTHTCLPCPAPELLGGPSVFLFPPKPKDTLMISRTPEVTCVVVDVSHEDPEVKFNWYVDGVEVHNAKTKPREEQYNSTYRVVSVLTVLHQDWLNGKEYKCKVSNKALPAPIEKTISKAKGQPREPQVYTLPPSRDELTKNQVSLTCLVKGFYPSDIAVEWESNGQPENNYKTTPPVLDSDGSFFLYSKLTVDKSRWQQGNVFSCSVMHEALHNHYTQKSLSLSPGK

SEQ ID NO: 1481 - protein, 248 aa, Artificial
  Synthetic
CNVNHKPSNTKVDKKVEPKSCDKTHTCIPCPAPELLGGPSVFLFPPKPKDTLMISRTPEVTCVVVDVSHEDPEVKFNWYVDGVEVHNAKTKPREEQYNSTYRVVSVLTVLHQDWLNGKEYKCKVSNKALPAPIEKTISKAKGQPREPQVYTLPPSRDELTKNQVSLTCLVKGFYPSDIAVEWESNGQPENNYKTTPPVLDSDGSFFLYSKLTVDKSRWQQGNVFSCSVMHEALHNHYTQKSLSLSPGK

SEQ ID NO: 1482 - protein, 248 aa, Artificial
  Synthetic
CNVNHKPSNTKVDKKVEPKSCDKTHTCFPCPAPELLGGPSVFLFPPKPKDTLMISRTPEVTCVVVDVSHEDPEVKFNWYVDGVEVHNAKTKPREEQYNSTYRVVSVLTVLHQDWLNGKEYKCKVSNKALPAPIEKTISKAKGQPREPQVYTLPPSRDELTKNQVSLTCLVKGFYPSDIAVEWESNGQPENNYKTTPPVLDSDGSFFLYSKLTVDKSRWQQGNVFSCSVMHEALHNHYTQKSLSLSPGK

SEQ ID NO: 1483 - protein, 248 aa, Artificial
  Synthetic
CNVNHKPSNTKVDKKVEPKSCDKTHTCMPCPAPELLGGPSVFLFPPKPKDTLMISRTPEVTCVVVDVSHEDPEVKFNWYVDGVEVHNAKTKPREEQYNSTYRVVSVLTVLHQDWLNGKEYKCKVSNKALPAPIEKTISKAKGQPREPQVYTLPPSRDELTKNQVSLTCLVKGFYPSDIAVEWESNGQPENNYKTTPPVLDSDGSFFLYSKLTVDKSRWQQGNVFSCSVMHEALHNHYTQKSLSLSPGK

SEQ ID NO: 1484 - protein, 248 aa, Artificial
  Synthetic
CNVNHKPSNTKVDKKVEPKSCDKTHTCWPCPAPELLGGPSVFLFPPKPKDTLMISRTPEVTCVVVDVSHEDPEVKFNWYVDGVEVHNAKTKPREEQYNSTYRVVSVLTVLHQDWLNGKEYKCKVSNKALPAPIEKTISKAKGQPREPQVYTLPPSRDELTKNQVSLTCLVKGFYPSDIAVEWESNGQPENNYKTTPPVLDSDGSFFLYSKLTVDKSRWQQGNVFSCSVMHEALHNHYTQKSLSLSPGK

SEQ ID NO: 1485 - protein, 248 aa, Artificial
  Synthetic
CNVNHKPSNTKVDKKVEPKSCDKTHTCPDCPAPELLGGPSVFLFPPKPKDTLMISRTPEVTCVVVDVSHEDPEVKFNWYVDGVEVHNAKTKPREEQYNSTYRVVSVLTVLHQDWLNGKEYKCKVSNKALPAPIEKTISKAKGQPREPQVYTLPPSRDELTKNQVSLTCLVKGFYPSDIAVEWESNGQPENNYKTTPPVLDSDGSFFLYSKLTVDKSRWQQGNVFSCSVMHEALHNHYTQKSLSLSPGK

SEQ ID NO: 1486 - protein, 248 aa, Artificial
  Synthetic
CNVNHKPSNTKVDKKVEPKSCDKTHTCPNCPAPELLGGPSVFLFPPKPKDTLMISRTPEVTCVVVDVSHEDPEVKFNWYVDGVEVHNAKTKPREEQYNSTYRVVSVLTVLHQDWLNGKEYKCKVSNKALPAPIEKTISKAKGQPREPQVYTLPPSRDELTKNQVSLTCLVKGFYPSDIAVEWESNGQPENNYKTTPPVLDSDGSFFLYSKLTVDKSRWQQGNVFSCSVMHEALHNHYTQKSLSLSPGK

SEQ ID NO: 1487 - protein, 248 aa, Artificial
  Synthetic
CNVNHKPSNTKVDKKVEPKSCDKTHTCPQCPAPELLGGPSVFLFPPKPKDTLMISRTPEVTCVVVDVSHEDPEVKFNWYVDGVEVHNAKTKPREEQYNSTYRVVSVLTVLHQDWLNGKEYKCKVSNKALPAPIEKTISKAKGQPREPQVYTLPPSRDELTKNQVSLTCLVKGFYPSDIAVEWESNGQPENNYKTTPPVLDSDGSFFLYSKLTVDKSRWQQGNVFSCSVMHEALHNHYTQKSLSLSPGK

SEQ ID NO: 1488 - protein, 248 aa, Artificial
  Synthetic
CNVNHKPSNTKVDKKVEPKSCDKTHTCPRCPAPELLGGPSVFLFPPKPKDTLMISRTPEVTCVVVDVSHEDPEVKFNWYVDGVEVHNAKTKPREEQYNSTYRVVSVLTVLHQDWLNGKEYKCKVSNKALPAPIEKTISKAKGQPREPQVYTLPPSRDELTKNQVSLTCLVKGFYPSDIAVEWESNGQPENNYKTTPPVLDSDGSFFLYSKLTVDKSRWQQGNVFSCSVMHEALHNHYTQKSLSLSPGK

SEQ ID NO: 1489 - protein, 248 aa, Artificial
  Synthetic
CNVNHKPSNTKVDKKVEPKSCDKTHTCPTCPAPELLGGPSVFLFPPKPKDTLMISRTPEVTCVVVDVSHEDPEVKFNWYVDGVEVHNAKTKPREEQYNSTYRVVSVLTVLHQDWLNGKEYKCKVSNKALPAPIEKTISKAKGQPREPQVYTLPPSRDELTKNQVSLTCLVKGFYPSDIAVEWESNGQPENNYKTTPPVLDSDGSFFLYSKLTVDKSRWQQGNVFSCSVMHEALHNHYTQKSLSLSPGK

SEQ ID NO: 1490 - protein, 248 aa, Artificial
  Synthetic
CNVNHKPSNTKVDKKVEPKSCDKTHTCPHCPAPELLGGPSVFLFPPKPKDTLMISRTPEVTCVVVDVSHEDPEVKFNWYVDGVEVHNAKTKPREEQYNSTYRVVSVLTVLHQDWLNGKEYKCKVSNKALPAPIEKTISKAKGQPREPQVYTLPPSRDELTKNQVSLTCLVKGFYPSDIAVEWESNGQPENNYKTTPPVLDSDGSFFLYSKLTVDKSRWQQGNVFSCSVMHEALHNHYTQKSLSLSPGK

SEQ ID NO: 1491 - protein, 248 aa, Artificial
  Synthetic
CNVNHKPSNTKVDKKVEPKSCDKTHTCPACPAPELLGGPSVFLFPPKPKDTLMISRTPEVTCVVVDVSHEDPEVKFNWYVDGVEVHNAKTKPREEQYNSTYRVVSVLTVLHQDWLNGKEYKCKVSNKALPAPIEKTISKAKGQPREPQVYTLPPSRDELTKNQVSLTCLVKGFYPSDIAVEWESNGQPENNYKTTPPVLDSDGSFFLYSKLTVDKSRWQQGNVFSCSVMHEALHNHYTQKSLSLSPGK

SEQ ID NO: 1492 - protein, 248 aa, Artificial
  Synthetic
CNVNHKPSNTKVDKKVEPKSCDKTHTCPVCPAPELLGGPSVFLFPPKPKDTLMISRTPEVTCVVVDVSHEDPEVKFNWYVDGVEVHNAKTKPREEQYNSTYRVVSVLTVLHQDWLNGKEYKCKVSNKALPAPIEKTISKAKGQPREPQVYTLPPSRDELTKNQVSLTCLVKGFYPSDIAVEWESNGQPENNYKTTPPVLDSDGSFFLYSKLTVDKSRWQQGNVFSCSVMHEALHNHYTQKSLSLSPGK

SEQ ID NO: 1493 - protein, 248 aa, Artificial
  Synthetic
CNVNHKPSNTKVDKKVEPKSCDKTHTCPLCPAPELLGGPSVFLFPPKPKDTLMISRTPEVTCVVVDVSHEDPEVKFNWYVDGVEVHNAKTKPREEQYNSTYRVVSVLTVLHQDWLNGKEYKCKVSNKALPAPIEKTISKAKGQPREPQVYTLPPSRDELTKNQVSLTCLVKGFYPSDIAVEWESNGQPENNYKTTPPVLDSDGSFFLYSKLTVDKSRWQQGNVFSCSVMHEALHNHYTQKSLSLSPGK

SEQ ID NO: 1494 - protein, 248 aa, Artificial
  Synthetic
CNVNHKPSNTKVDKKVEPKSCDKTHTCPICPAPELLGGPSVFLFPPKPKDTLMISRTPEVTCVVVDVSHEDPEVKFNWYVDGVEVHNAKTKPREEQYNSTYRVVSVLTVLHQDWLNGKEYKCKVSNKALPAPIEKTISKAKGQPREPQVYTLPPSRDELTKNQVSLTCLVKGFYPSDIAVEWESNGQPENNYKTTPPVLDSDGSFFLYSKLTVDKSRWQQGNVFSCSVMHEALHNHYTQKSLSLSPGK

SEQ ID NO: 1495 - protein, 248 aa, Artificial
  Synthetic
CNVNHKPSNTKVDKKVEPKSCDKTHTCPFCPAPELLGGPSVFLFPPKPKDTLMISRTPEVTCVVVDVSHEDPEVKFNWYVDGVEVHNAKTKPREEQYNSTYRVVSVLTVLHQDWLNGKEYKCKVSNKALPAPIEKTISKAKGQPREPQVYTLPPSRDELTKNQVSLTCLVKGFYPSDIAVEWESNGQPENNYKTTPPVLDSDGSFFLYSKLTVDKSRWQQGNVFSCSVMHEALHNHYTQKSLSLSPGK

SEQ ID NO: 1496 - protein, 248 aa, Artificial
  Synthetic
CNVNHKPSNTKVDKKVEPKSCDKTHTCPMCPAPELLGGPSVFLFPPKPKDTLMISRTPEVTCVVVDVSHEDPEVKFNWYVDGVEVHNAKTKPREEQYNSTYRVVSVLTVLHQDWLNGKEYKCKVSNKALPAPIEKTISKAKGQPREPQVYTLPPSRDELTKNQVSLTCLVKGFYPSDIAVEWESNGQPENNYKTTPPVLDSDGSFFLYSKLTVDKSRWQQGNVFSCSVMHEALHNHYTQKSLSLSPGK

SEQ ID NO: 1497 - protein, 248 aa, Artificial
  Synthetic
CNVNHKPSNTKVDKKVEPKSCDKTHTCPWCPAPELLGGPSVFLFPPKPKDTLMISRTPEVTCVVVDVSHEDPEVKFNWYVDGVEVHNAKTKPREEQYNSTYRVVSVLTVLHQDWLNGKEYKCKVSNKALPAPIEKTISKAKGQPREPQVYTLPPSRDELTKNQVSLTCLVKGFYPSDIAVEWESNGQPENNYKTTPPVLDSDGSFFLYSKLTVDKSRWQQGNVFSCSVMHEALHNHYTQKSLSLSPGK

SEQ ID NO: 1498 - protein, 248 aa, Artificial
  Synthetic
CNVNHKPSNTKVDKKVEPKSCDKTHTCPPSPAPELLGGPSVFLFPPKPKDTLMISRTPEVTCVVVDVSHEDPEVKFNWYVDGVEVHNAKTKPREEQYNSTYRVVSVLTVLHQDWLNGKEYKCKVSNKALPAPIEKTISKAKGQPREPQVYTLPPSRDELTKNQVSLTCLVKGFYPSDIAVEWESNGQPENNYKTTPPVLDSDGSFFLYSKLTVDKSRWQQGNVFSCSVMHEALHNHYTQKSLSLSPGK

SEQ ID NO: 1499 - protein, 248 aa, Artificial
  Synthetic
CNVNHKPSNTKVDKKVEPKSCDKTHTCPPCDAPELLGGPSVFLFPPKPKDTLMISRTPEVTCVVVDVSHEDPEVKFNWYVDGVEVHNAKTKPREEQYNSTYRVVSVLTVLHQDWLNGKEYKCKVSNKALPAPIEKTISKAKGQPREPQVYTLPPSRDELTKNQVSLTCLVKGFYPSDIAVEWESNGQPENNYKTTPPVLDSDGSFFLYSKLTVDKSRWQQGNVFSCSVMHEALHNHYTQKSLSLSPGK

SEQ ID NO: 1500 - protein, 248 aa, Artificial
  Synthetic
CNVNHKPSNTKVDKKVEPKSCDKTHTCPPCNAPELLGGPSVFLFPPKPKDTLMISRTPEVTCVVVDVSHEDPEVKFNWYVDGVEVHNAKTKPREEQYNSTYRVVSVLTVLHQDWLNGKEYKCKVSNKALPAPIEKTISKAKGQPREPQVYTLPPSRDELTKNQVSLTCLVKGFYPSDIAVEWESNGQPENNYKTTPPVLDSDGSFFLYSKLTVDKSRWQQGNVFSCSVMHEALHNHYTQKSLSLSPGK

SEQ ID NO: 1501 - protein, 248 aa, Artificial
  Synthetic
CNVNHKPSNTKVDKKVEPKSCDKTHTCPPCQAPELLGGPSVFLFPPKPKDTLMISRTPEVTCVVVDVSHEDPEVKFNWYVDGVEVHNAKTKPREEQYNSTYRVVSVLTVLHQDWLNGKEYKCKVSNKALPAPIEKTISKAKGQPREPQVYTLPPSRDELTKNQVSLTCLVKGFYPSDIAVEWESNGQPENNYKTTPPVLDSDGSFFLYSKLTVDKSRWQQGNVFSCSVMHEALHNHYTQKSLSLSPGK

SEQ ID NO: 1502 - protein, 248 aa, Artificial
  Synthetic
CNVNHKPSNTKVDKKVEPKSCDKTHTCPPCKAPELLGGPSVFLFPPKPKDTLMISRTPEVTCVVVDVSHEDPEVKFNWYVDGVEVHNAKTKPREEQYNSTYRVVSVLTVLHQDWLNGKEYKCKVSNKALPAPIEKTISKAKGQPREPQVYTLPPSRDELTKNQVSLTCLVKGFYPSDIAVEWESNGQPENNYKTTPPVLDSDGSFFLYSKLTVDKSRWQQGNVFSCSVMHEALHNHYTQKSLSLSPGK

SEQ ID NO: 1503 - protein, 248 aa, Artificial
  Synthetic
CNVNHKPSNTKVDKKVEPKSCDKTHTCPPCRAPELLGGPSVFLFPPKPKDTLMISRTPEVTCVVVDVSHEDPEVKFNWYVDGVEVHNAKTKPREEQYNSTYRVVSVLTVLHQDWLNGKEYKCKVSNKALPAPIEKTISKAKGQPREPQVYTLPPSRDELTKNQVSLTCLVKGFYPSDIAVEWESNGQPENNYKTTPPVLDSDGSFFLYSKLTVDKSRWQQGNVFSCSVMHEALHNHYTQKSLSLSPGK

SEQ ID NO: 1504 - protein, 248 aa, Artificial
  Synthetic
CNVNHKPSNTKVDKKVEPKSCDKTHTCPPCSAPELLGGPSVFLFPPKPKDTLMISRTPEVTCVVVDVSHEDPEVKFNWYVDGVEVHNAKTKPREEQYNSTYRVVSVLTVLHQDWLNGKEYKCKVSNKALPAPIEKTISKAKGQPREPQVYTLPPSRDELTKNQVSLTCLVKGFYPSDIAVEWESNGQPENNYKTTPPVLDSDGSFFLYSKLTVDKSRWQQGNVFSCSVMHEALHNHYTQKSLSLSPGK

SEQ ID NO: 1505 - protein, 248 aa, Artificial
  Synthetic
CNVNHKPSNTKVDKKVEPKSCDKTHTCPPCTAPELLGGPSVFLFPPKPKDTLMISRTPEVTCVVVDVSHEDPEVKFNWYVDGVEVHNAKTKPREEQYNSTYRVVSVLTVLHQDWLNGKEYKCKVSNKALPAPIEKTISKAKGQPREPQVYTLPPSRDELTKNQVSLTCLVKGFYPSDIAVEWESNGQPENNYKTTPPVLDSDGSFFLYSKLTVDKSRWQQGNVFSCSVMHEALHNHYTQKSLSLSPGK

SEQ ID NO: 1506 - protein, 248 aa, Artificial
  Synthetic
CNVNHKPSNTKVDKKVEPKSCDKTHTCPPCHAPELLGGPSVFLFPPKPKDTLMISRTPEVTCVVVDVSHEDPEVKFNWYVDGVEVHNAKTKPREEQYNSTYRVVSVLTVLHQDWLNGKEYKCKVSNKALPAPIEKTISKAKGQPREPQVYTLPPSRDELTKNQVSLTCLVKGFYPSDIAVEWESNGQPENNYKTTPPVLDSDGSFFLYSKLTVDKSRWQQGNVFSCSVMHEALHNHYTQKSLSLSPGK

SEQ ID NO: 1507 - protein, 248 aa, Artificial
  Synthetic
CNVNHKPSNTKVDKKVEPKSCDKTHTCPPCVAPELLGGPSVFLFPPKPKDTLMISRTPEVTCVVVDVSHEDPEVKFNWYVDGVEVHNAKTKPREEQYNSTYRVVSVLTVLHQDWLNGKEYKCKVSNKALPAPIEKTISKAKGQPREPQVYTLPPSRDELTKNQVSLTCLVKGFYPSDIAVEWESNGQPENNYKTTPPVLDSDGSFFLYSKLTVDKSRWQQGNVFSCSVMHEALHNHYTQKSLSLSPGK

SEQ ID NO: 1508 - protein, 248 aa, Artificial
  Synthetic
CNVNHKPSNTKVDKKVEPKSCDKTHTCPPCLAPELLGGPSVFLFPPKPKDTLMISRTPEVTCVVVDVSHEDPEVKFNWYVDGVEVHNAKTKPREEQYNSTYRVVSVLTVLHQDWLNGKEYKCKVSNKALPAPIEKTISKAKGQPREPQVYTLPPSRDELTKNQVSLTCLVKGFYPSDIAVEWESNGQPENNYKTTPPVLDSDGSFFLYSKLTVDKSRWQQGNVFSCSVMHEALHNHYTQKSLSLSPGK

SEQ ID NO: 1509 - protein, 248 aa, Artificial
  Synthetic
CNVNHKPSNTKVDKKVEPKSCDKTHTCPPCIAPELLGGPSVFLFPPKPKDTLMISRTPEVTCVVVDVSHEDPEVKFNWYVDGVEVHNAKTKPREEQYNSTYRVVSVLTVLHQDWLNGKEYKCKVSNKALPAPIEKTISKAKGQPREPQVYTLPPSRDELTKNQVSLTCLVKGFYPSDIAVEWESNGQPENNYKTTPPVLDSDGSFFLYSKLTVDKSRWQQGNVFSCSVMHEALHNHYTQKSLSLSPGK

SEQ ID NO: 1510 - protein, 248 aa, Artificial
  Synthetic
CNVNHKPSNTKVDKKVEPKSCDKTHTCPPCFAPELLGGPSVFLFPPKPKDTLMISRTPEVTCVVVDVSHEDPEVKFNWYVDGVEVHNAKTKPREEQYNSTYRVVSVLTVLHQDWLNGKEYKCKVSNKALPAPIEKTISKAKGQPREPQVYTLPPSRDELTKNQVSLTCLVKGFYPSDIAVEWESNGQPENNYKTTPPVLDSDGSFFLYSKLTVDKSRWQQGNVFSCSVMHEALHNHYTQKSLSLSPGK

SEQ ID NO: 1511 - protein, 248 aa, Artificial
  Synthetic
CNVNHKPSNTKVDKKVEPKSCDKTHTCPPCMAPELLGGPSVFLFPPKPKDTLMISRTPEVTCVVVDVSHEDPEVKFNWYVDGVEVHNAKTKPREEQYNSTYRVVSVLTVLHQDWLNGKEYKCKVSNKALPAPIEKTISKAKGQPREPQVYTLPPSRDELTKNQVSLTCLVKGFYPSDIAVEWESNGQPENNYKTTPPVLDSDGSFFLYSKLTVDKSRWQQGNVFSCSVMHEALHNHYTQKSLSLSPGK

SEQ ID NO: 1512 - protein, 248 aa, Artificial
  Synthetic
CNVNHKPSNTKVDKKVEPKSCDKTHTCPPCWAPELLGGPSVFLFPPKPKDTLMISRTPEVTCVVVDVSHEDPEVKFNWYVDGVEVHNAKTKPREEQYNSTYRVVSVLTVLHQDWLNGKEYKCKVSNKALPAPIEKTISKAKGQPREPQVYTLPPSRDELTKNQVSLTCLVKGFYPSDIAVEWESNGQPENNYKTTPPVLDSDGSFFLYSKLTVDKSRWQQGNVFSCSVMHEALHNHYTQKSLSLSPGK

SEQ ID NO: 1513 - protein, 248 aa, Artificial
  Synthetic
CNVNHKPSNTKVDKKVEPKSCDKTHTCPPCPDPELLGGPSVFLFPPKPKDTLMISRTPEVTCVVVDVSHEDPEVKFNWYVDGVEVHNAKTKPREEQYNSTYRVVSVLTVLHQDWLNGKEYKCKVSNKALPAPIEKTISKAKGQPREPQVYTLPPSRDELTKNQVSLTCLVKGFYPSDIAVEWESNGQPENNYKTTPPVLDSDGSFFLYSKLTVDKSRWQQGNVFSCSVMHEALHNHYTQKSLSLSPGK

SEQ ID NO: 1514 - protein, 248 aa, Artificial
  Synthetic
CNVNHKPSNTKVDKKVEPKSCDKTHTCPPCPNPELLGGPSVFLFPPKPKDTLMISRTPEVTCVVVDVSHEDPEVKFNWYVDGVEVHNAKTKPREEQYNSTYRVVSVLTVLHQDWLNGKEYKCKVSNKALPAPIEKTISKAKGQPREPQVYTLPPSRDELTKNQVSLTCLVKGFYPSDIAVEWESNGQPENNYKTTPPVLDSDGSFFLYSKLTVDKSRWQQGNVFSCSVMHEALHNHYTQKSLSLSPGK

SEQ ID NO: 1515 - protein, 248 aa, Artificial
  Synthetic
CNVNHKPSNTKVDKKVEPKSCDKTHTCPPCPQPELLGGPSVFLFPPKPKDTLMISRTPEVTCVVVDVSHEDPEVKFNWYVDGVEVHNAKTKPREEQYNSTYRVVSVLTVLHQDWLNGKEYKCKVSNKALPAPIEKTISKAKGQPREPQVYTLPPSRDELTKNQVSLTCLVKGFYPSDIAVEWESNGQPENNYKTTPPVLDSDGSFFLYSKLTVDKSRWQQGNVFSCSVMHEALHNHYTQKSLSLSPGK

SEQ ID NO: 1516 - protein, 248 aa, Artificial
  Synthetic
CNVNHKPSNTKVDKKVEPKSCDKTHTCPPCPRPELLGGPSVFLFPPKPKDTLMISRTPEVTCVVVDVSHEDPEVKFNWYVDGVEVHNAKTKPREEQYNSTYRVVSVLTVLHQDWLNGKEYKCKVSNKALPAPIEKTISKAKGQPREPQVYTLPPSRDELTKNQVSLTCLVKGFYPSDIAVEWESNGQPENNYKTTPPVLDSDGSFFLYSKLTVDKSRWQQGNVFSCSVMHEALHNHYTQKSLSLSPGK

SEQ ID NO: 1517 - protein, 248 aa, Artificial
  Synthetic
CNVNHKPSNTKVDKKVEPKSCDKTHTCPPCPSPELLGGPSVFLFPPKPKDTLMISRTPEVTCVVVDVSHEDPEVKFNWYVDGVEVHNAKTKPREEQYNSTYRVVSVLTVLHQDWLNGKEYKCKVSNKALPAPIEKTISKAKGQPREPQVYTLPPSRDELTKNQVSLTCLVKGFYPSDIAVEWESNGQPENNYKTTPPVLDSDGSFFLYSKLTVDKSRWQQGNVFSCSVMHEALHNHYTQKSLSLSPGK

SEQ ID NO: 1518 - protein, 248 aa, Artificial
  Synthetic
CNVNHKPSNTKVDKKVEPKSCDKTHTCPPCPTPELLGGPSVFLFPPKPKDTLMISRTPEVTCVVVDVSHEDPEVKFNWYVDGVEVHNAKTKPREEQYNSTYRVVSVLTVLHQDWLNGKEYKCKVSNKALPAPIEKTISKAKGQPREPQVYTLPPSRDELTKNQVSLTCLVKGFYPSDIAVEWESNGQPENNYKTTPPVLDSDGSFFLYSKLTVDKSRWQQGNVFSCSVMHEALHNHYTQKSLSLSPGK

SEQ ID NO: 1519 - protein, 248 aa, Artificial
  Synthetic
CNVNHKPSNTKVDKKVEPKSCDKTHTCPPCPHPELLGGPSVFLFPPKPKDTLMISRTPEVTCVVVDVSHEDPEVKFNWYVDGVEVHNAKTKPREEQYNSTYRVVSVLTVLHQDWLNGKEYKCKVSNKALPAPIEKTISKAKGQPREPQVYTLPPSRDELTKNQVSLTCLVKGFYPSDIAVEWESNGQPENNYKTTPPVLDSDGSFFLYSKLTVDKSRWQQGNVFSCSVMHEALHNHYTQKSLSLSPGK

SEQ ID NO: 1520 - protein, 248 aa, Artificial
  Synthetic
CNVNHKPSNTKVDKKVEPKSCDKTHTCPPCPVPELLGGPSVFLFPPKPKDTLMISRTPEVTCVVVDVSHEDPEVKFNWYVDGVEVHNAKTKPREEQYNSTYRVVSVLTVLHQDWLNGKEYKCKVSNKALPAPIEKTISKAKGQPREPQVYTLPPSRDELTKNQVSLTCLVKGFYPSDIAVEWESNGQPENNYKTTPPVLDSDGSFFLYSKLTVDKSRWQQGNVFSCSVMHEALHNHYTQKSLSLSPGK

SEQ ID NO: 1521 - protein, 248 aa, Artificial
  Synthetic
CNVNHKPSNTKVDKKVEPKSCDKTHTCPPCPLPELLGGPSVFLFPPKPKDTLMISRTPEVTCVVVDVSHEDPEVKFNWYVDGVEVHNAKTKPREEQYNSTYRVVSVLTVLHQDWLNGKEYKCKVSNKALPAPIEKTISKAKGQPREPQVYTLPPSRDELTKNQVSLTCLVKGFYPSDIAVEWESNGQPENNYKTTPPVLDSDGSFFLYSKLTVDKSRWQQGNVFSCSVMHEALHNHYTQKSLSLSPGK

SEQ ID NO: 1522 - protein, 248 aa, Artificial
  Synthetic
CNVNHKPSNTKVDKKVEPKSCDKTHTCPPCPIPELLGGPSVFLFPPKPKDTLMISRTPEVTCVVVDVSHEDPEVKFNWYVDGVEVHNAKTKPREEQYNSTYRVVSVLTVLHQDWLNGKEYKCKVSNKALPAPIEKTISKAKGQPREPQVYTLPPSRDELTKNQVSLTCLVKGFYPSDIAVEWESNGQPENNYKTTPPVLDSDGSFFLYSKLTVDKSRWQQGNVFSCSVMHEALHNHYTQKSLSLSPGK

SEQ ID NO: 1523 - protein, 248 aa, Artificial
  Synthetic
CNVNHKPSNTKVDKKVEPKSCDKTHTCPPCPFPELLGGPSVFLFPPKPKDTLMISRTPEVTCVVVDVSHEDPEVKFNWYVDGVEVHNAKTKPREEQYNSTYRVVSVLTVLHQDWLNGKEYKCKVSNKALPAPIEKTISKAKGQPREPQVYTLPPSRDELTKNQVSLTCLVKGFYPSDIAVEWESNGQPENNYKTTPPVLDSDGSFFLYSKLTVDKSRWQQGNVFSCSVMHEALHNHYTQKSLSLSPGK

SEQ ID NO: 1524 - protein, 248 aa, Artificial
  Synthetic
CNVNHKPSNTKVDKKVEPKSCDKTHTCPPCPMPELLGGPSVFLFPPKPKDTLMISRTPEVTCVVVDVSHEDPEVKFNWYVDGVEVHNAKTKPREEQYNSTYRVVSVLTVLHQDWLNGKEYKCKVSNKALPAPIEKTISKAKGQPREPQVYTLPPSRDELTKNQVSLTCLVKGFYPSDIAVEWESNGQPENNYKTTPPVLDSDGSFFLYSKLTVDKSRWQQGNVFSCSVMHEALHNHYTQKSLSLSPGK

SEQ ID NO: 1525 - protein, 248 aa, Artificial
  Synthetic
CNVNHKPSNTKVDKKVEPKSCDKTHTCPPCPWPELLGGPSVFLFPPKPKDTLMISRTPEVTCVVVDVSHEDPEVKFNWYVDGVEVHNAKTKPREEQYNSTYRVVSVLTVLHQDWLNGKEYKCKVSNKALPAPIEKTISKAKGQPREPQVYTLPPSRDELTKNQVSLTCLVKGFYPSDIAVEWESNGQPENNYKTTPPVLDSDGSFFLYSKLTVDKSRWQQGNVFSCSVMHEALHNHYTQKSLSLSPGK

SEQ ID NO: 1526 - protein, 248 aa, Artificial
  Synthetic
CNVNHKPSNTKVDKKVEPKSCDKTHTCPPCPADELLGGPSVFLFPPKPKDTLMISRTPEVTCVVVDVSHEDPEVKFNWYVDGVEVHNAKTKPREEQYNSTYRVVSVLTVLHQDWLNGKEYKCKVSNKALPAPIEKTISKAKGQPREPQVYTLPPSRDELTKNQVSLTCLVKGFYPSDIAVEWESNGQPENNYKTTPPVLDSDGSFFLYSKLTVDKSRWQQGNVFSCSVMHEALHNHYTQKSLSLSPGK

SEQ ID NO: 1527 - protein, 248 aa, Artificial
  Synthetic
CNVNHKPSNTKVDKKVEPKSCDKTHTCPPCPANELLGGPSVFLFPPKPKDTLMISRTPEVTCVVVDVSHEDPEVKFNWYVDGVEVHNAKTKPREEQYNSTYRVVSVLTVLHQDWLNGKEYKCKVSNKALPAPIEKTISKAKGQPREPQVYTLPPSRDELTKNQVSLTCLVKGFYPSDIAVEWESNGQPENNYKTTPPVLDSDGSFFLYSKLTVDKSRWQQGNVFSCSVMHEALHNHYTQKSLSLSPGK

SEQ ID NO: 1528 - protein, 248 aa, Artificial
  Synthetic
CNVNHKPSNTKVDKKVEPKSCDKTHTCPPCPAQELLGGPSVFLFPPKPKDTLMISRTPEVTCVVVDVSHEDPEVKFNWYVDGVEVHNAKTKPREEQYNSTYRVVSVLTVLHQDWLNGKEYKCKVSNKALPAPIEKTISKAKGQPREPQVYTLPPSRDELTKNQVSLTCLVKGFYPSDIAVEWESNGQPENNYKTTPPVLDSDGSFFLYSKLTVDKSRWQQGNVFSCSVMHEALHNHYTQKSLSLSPGK

SEQ ID NO: 1529 - protein, 248 aa, Artificial
  Synthetic
CNVNHKPSNTKVDKKVEPKSCDKTHTCPPCPARELLGGPSVFLFPPKPKDTLMISRTPEVTCVVVDVSHEDPEVKFNWYVDGVEVHNAKTKPREEQYNSTYRVVSVLTVLHQDWLNGKEYKCKVSNKALPAPIEKTISKAKGQPREPQVYTLPPSRDELTKNQVSLTCLVKGFYPSDIAVEWESNGQPENNYKTTPPVLDSDGSFFLYSKLTVDKSRWQQGNVFSCSVMHEALHNHYTQKSLSLSPGK

SEQ ID NO: 1530 - protein, 248 aa, Artificial
  Synthetic
CNVNHKPSNTKVDKKVEPKSCDKTHTCPPCPASELLGGPSVFLFPPKPKDTLMISRTPEVTCVVVDVSHEDPEVKFNWYVDGVEVHNAKTKPREEQYNSTYRVVSVLTVLHQDWLNGKEYKCKVSNKALPAPIEKTISKAKGQPREPQVYTLPPSRDELTKNQVSLTCLVKGFYPSDIAVEWESNGQPENNYKTTPPVLDSDGSFFLYSKLTVDKSRWQQGNVFSCSVMHEALHNHYTQKSLSLSPGK

SEQ ID NO: 1531 - protein, 248 aa, Artificial
  Synthetic
CNVNHKPSNTKVDKKVEPKSCDKTHTCPPCPATELLGGPSVFLFPPKPKDTLMISRTPEVTCVVVDVSHEDPEVKFNWYVDGVEVHNAKTKPREEQYNSTYRVVSVLTVLHQDWLNGKEYKCKVSNKALPAPIEKTISKAKGQPREPQVYTLPPSRDELTKNQVSLTCLVKGFYPSDIAVEWESNGQPENNYKTTPPVLDSDGSFFLYSKLTVDKSRWQQGNVFSCSVMHEALHNHYTQKSLSLSPGK

SEQ ID NO: 1532 - protein, 248 aa, Artificial
  Synthetic
CNVNHKPSNTKVDKKVEPKSCDKTHTCPPCPAHELLGGPSVFLFPPKPKDTLMISRTPEVTCVVVDVSHEDPEVKFNWYVDGVEVHNAKTKPREEQYNSTYRVVSVLTVLHQDWLNGKEYKCKVSNKALPAPIEKTISKAKGQPREPQVYTLPPSRDELTKNQVSLTCLVKGFYPSDIAVEWESNGQPENNYKTTPPVLDSDGSFFLYSKLTVDKSRWQQGNVFSCSVMHEALHNHYTQKSLSLSPGK

SEQ ID NO: 1533 - protein, 248 aa, Artificial
  Synthetic
CNVNHKPSNTKVDKKVEPKSCDKTHTCPPCPAAELLGGPSVFLFPPKPKDTLMISRTPEVTCVVVDVSHEDPEVKFNWYVDGVEVHNAKTKPREEQYNSTYRVVSVLTVLHQDWLNGKEYKCKVSNKALPAPIEKTISKAKGQPREPQVYTLPPSRDELTKNQVSLTCLVKGFYPSDIAVEWESNGQPENNYKTTPPVLDSDGSFFLYSKLTVDKSRWQQGNVFSCSVMHEALHNHYTQKSLSLSPGK

SEQ ID NO: 1534 - protein, 248 aa, Artificial
  Synthetic
CNVNHKPSNTKVDKKVEPKSCDKTHTCPPCPAVELLGGPSVFLFPPKPKDTLMISRTPEVTCVVVDVSHEDPEVKFNWYVDGVEVHNAKTKPREEQYNSTYRVVSVLTVLHQDWLNGKEYKCKVSNKALPAPIEKTISKAKGQPREPQVYTLPPSRDELTKNQVSLTCLVKGFYPSDIAVEWESNGQPENNYKTTPPVLDSDGSFFLYSKLTVDKSRWQQGNVFSCSVMHEALHNHYTQKSLSLSPGK

SEQ ID NO: 1535 - protein, 248 aa, Artificial
  Synthetic
CNVNHKPSNTKVDKKVEPKSCDKTHTCPPCPALELLGGPSVFLFPPKPKDTLMISRTPEVTCVVVDVSHEDPEVKFNWYVDGVEVHNAKTKPREEQYNSTYRVVSVLTVLHQDWLNGKEYKCKVSNKALPAPIEKTISKAKGQPREPQVYTLPPSRDELTKNQVSLTCLVKGFYPSDIAVEWESNGQPENNYKTTPPVLDSDGSFFLYSKLTVDKSRWQQGNVFSCSVMHEALHNHYTQKSLSLSPGK

SEQ ID NO: 1536 - protein, 248 aa, Artificial
  Synthetic
CNVNHKPSNTKVDKKVEPKSCDKTHTCPPCPAIELLGGPSVFLFPPKPKDTLMISRTPEVTCVVVDVSHEDPEVKFNWYVDGVEVHNAKTKPREEQYNSTYRVVSVLTVLHQDWLNGKEYKCKVSNKALPAPIEKTISKAKGQPREPQVYTLPPSRDELTKNQVSLTCLVKGFYPSDIAVEWESNGQPENNYKTTPPVLDSDGSFFLYSKLTVDKSRWQQGNVFSCSVMHEALHNHYTQKSLSLSPGK

SEQ ID NO: 1537 - protein, 248 aa, Artificial
  Synthetic
CNVNHKPSNTKVDKKVEPKSCDKTHTCPPCPAFELLGGPSVFLFPPKPKDTLMISRTPEVTCVVVDVSHEDPEVKFNWYVDGVEVHNAKTKPREEQYNSTYRVVSVLTVLHQDWLNGKEYKCKVSNKALPAPIEKTISKAKGQPREPQVYTLPPSRDELTKNQVSLTCLVKGFYPSDIAVEWESNGQPENNYKTTPPVLDSDGSFFLYSKLTVDKSRWQQGNVFSCSVMHEALHNHYTQKSLSLSPGK

SEQ ID NO: 1538 - protein, 248 aa, Artificial
  Synthetic
CNVNHKPSNTKVDKKVEPKSCDKTHTCPPCPAMELLGGPSVFLFPPKPKDTLMISRTPEVTCVVVDVSHEDPEVKFNWYVDGVEVHNAKTKPREEQYNSTYRVVSVLTVLHQDWLNGKEYKCKVSNKALPAPIEKTISKAKGQPREPQVYTLPPSRDELTKNQVSLTCLVKGFYPSDIAVEWESNGQPENNYKTTPPVLDSDGSFFLYSKLTVDKSRWQQGNVFSCSVMHEALHNHYTQKSLSLSPGK

SEQ ID NO: 1539 - protein, 248 aa, Artificial
  Synthetic
CNVNHKPSNTKVDKKVEPKSCDKTHTCPPCPAWELLGGPSVFLFPPKPKDTLMISRTPEVTCVVVDVSHEDPEVKFNWYVDGVEVHNAKTKPREEQYNSTYRVVSVLTVLHQDWLNGKEYKCKVSNKALPAPIEKTISKAKGQPREPQVYTLPPSRDELTKNQVSLTCLVKGFYPSDIAVEWESNGQPENNYKTTPPVLDSDGSFFLYSKLTVDKSRWQQGNVFSCSVMHEALHNHYTQKSLSLSPGK

SEQ ID NO: 1540 - protein, 248 aa, Artificial
  Synthetic
CNVNHKPSNTKVDKKVEPKSCKKTHTCPPCPAPELLGGPSVFLFPPKPKDTLMISRTPEVTCVVVDVSHEDPEVKFNWYVDGVEVHNAKTKPREEQYNSTYRVVSVLTVLHQDWLNGKEYKCKVSNKALPAPEEKTISKAKGQPREPQVYTLPPSRDELTKNQVSLTCLVKGFYPSDIAVEWESNGQPENNYKTTPPVLDSDGSFFLYSKLTVDKSRWQQGNVFSCSVMHEALHNHYTQKSLSLSPGK

SEQ ID NO: 1541 - protein, 248 aa, Artificial
  Synthetic
CNVNHKPSNTKVDKKVEPKSCDKKHTCPPCPAPELLGGPSVFLFPPKPKDTLMISRTPEVTCVVVDVSHEDPEVKFNWYVDGVEVHNAKTKPREEQYNSTYRVVSVLTVLHQDWLNGKEYKCKVSNKALPAPEEKTISKAKGQPREPQVYTLPPSRDELTKNQVSLTCLVKGFYPSDIAVEWESNGQPENNYKTTPPVLDSDGSFFLYSKLTVDKSRWQQGNVFSCSVMHEALHNHYTQKSLSLSPGK

SEQ ID NO: 1542 - protein, 248 aa, Artificial
  Synthetic
CNVNHKPSNTKVDKKVEPKSCDKTETCPPCPAPELLGGPSVFLFPPKPKDTLMISRTPEVTCVVVDVSHEDPEVKFNWYVDGVEVHNAKTKPREEQYNSTYRVVSVLTVLHQDWLNGKEYKCKVSNKALPAPEEKTISKAKGQPREPQVYTLPPSRDELTKNQVSLTCLVKGFYPSDIAVEWESNGQPENNYKTTPPVLDSDGSFFLYSKLTVDKSRWQQGNVFSCSVMHEALHNHYTQKSLSLSPGK

SEQ ID NO: 1543 - protein, 248 aa, Artificial
  Synthetic
CNVNHKPSNTKVDKKVEPKSCDKTHECPPCPAPELLGGPSVFLFPPKPKDTLMISRTPEVTCVVVDVSHEDPEVKFNWYVDGVEVHNAKTKPREEQYNSTYRVVSVLTVLHQDWLNGKEYKCKVSNKALPAPEEKTISKAKGQPREPQVYTLPPSRDELTKNQVSLTCLVKGFYPSDIAVEWESNGQPENNYKTTPPVLDSDGSFFLYSKLTVDKSRWQQGNVFSCSVMHEALHNHYTQKSLSLSPGK

SEQ ID NO: 1544 - protein, 248 aa, Artificial
  Synthetic
CNVNHKPSNTKVDKKVEPKSCDKTHTCGPCPAPELLGGPSVFLFPPKPKDTLMISRTPEVTCVVVDVSHEDPEVKFNWYVDGVEVHNAKTKPREEQYNSTYRVVSVLTVLHQDWLNGKEYKCKVSNKALPAPEEKTISKAKGQPREPQVYTLPPSRDELTKNQVSLTCLVKGFYPSDIAVEWESNGQPENNYKTTPPVLDSDGSFFLYSKLTVDKSRWQQGNVFSCSVMHEALHNHYTQKSLSLSPGK

SEQ ID NO: 1545 - protein, 248 aa, Artificial
  Synthetic
CNVNHKPSNTKVDKKVEPKSCKKKHTCPPCPAPELLGGPSVFLFPPKPKDTLMISRTPEVTCVVVDVSHEDPEVKFNWYVDGVEVHNAKTKPREEQYNSTYRVVSVLTVLHQDWLNGKEYKCKVSNKALPAPIEKTISKAKGQPREPQVYTLPPSRDELTKNQVSLTCLVKGFYPSDIAVEWESNGQPENNYKTTPPVLDSDGSFFLYSKLTVDKSRWQQGNVFSCSVMHEALHNHYTQKSLSLSPGK

SEQ ID NO: 1546 - protein, 248 aa, Artificial
  Synthetic
CNVNHKPSNTKVDKKVEPKSCKKTETCPPCPAPELLGGPSVFLFPPKPKDTLMISRTPEVTCVVVDVSHEDPEVKFNWYVDGVEVHNAKTKPREEQYNSTYRVVSVLTVLHQDWLNGKEYKCKVSNKALPAPIEKTISKAKGQPREPQVYTLPPSRDELTKNQVSLTCLVKGFYPSDIAVEWESNGQPENNYKTTPPVLDSDGSFFLYSKLTVDKSRWQQGNVFSCSVMHEALHNHYTQKSLSLSPGK

SEQ ID NO: 1547 - protein, 248 aa, Artificial
  Synthetic
CNVNHKPSNTKVDKKVEPKSCKKTHECPPCPAPELLGGPSVFLFPPKPKDTLMISRTPEVTCVVVDVSHEDPEVKFNWYVDGVEVHNAKTKPREEQYNSTYRVVSVLTVLHQDWLNGKEYKCKVSNKALPAPIEKTISKAKGQPREPQVYTLPPSRDELTKNQVSLTCLVKGFYPSDIAVEWESNGQPENNYKTTPPVLDSDGSFFLYSKLTVDKSRWQQGNVFSCSVMHEALHNHYTQKSLSLSPGK

SEQ ID NO: 1548 - protein, 248 aa, Artificial
  Synthetic
CNVNHKPSNTKVDKKVEPKSCKKTHTCGPCPAPELLGGPSVFLFPPKPKDTLMISRTPEVTCVVVDVSHEDPEVKFNWYVDGVEVHNAKTKPREEQYNSTYRVVSVLTVLHQDWLNGKEYKCKVSNKALPAPIEKTISKAKGQPREPQVYTLPPSRDELTKNQVSLTCLVKGFYPSDIAVEWESNGQPENNYKTTPPVLDSDGSFFLYSKLTVDKSRWQQGNVFSCSVMHEALHNHYTQKSLSLSPGK

SEQ ID NO: 1549 - protein, 248 aa, Artificial
  Synthetic
CNVNHKPSNTKVDKKVEPKSCDKKETCPPCPAPELLGGPSVFLFPPKPKDTLMISRTPEVTCVVVDVSHEDPEVKFNWYVDGVEVHNAKTKPREEQYNSTYRVVSVLTVLHQDWLNGKEYKCKVSNKALPAPIEKTISKAKGQPREPQVYTLPPSRDELTKNQVSLTCLVKGFYPSDIAVEWESNGQPENNYKTTPPVLDSDGSFFLYSKLTVDKSRWQQGNVFSCSVMHEALHNHYTQKSLSLSPGK

SEQ ID NO: 1550 - protein, 248 aa, Artificial
  Synthetic
CNVNHKPSNTKVDKKVEPKSCDKKHECPPCPAPELLGGPSVFLFPPKPKDTLMISRTPEVTCVVVDVSHEDPEVKFNWYVDGVEVHNAKTKPREEQYNSTYRVVSVLTVLHQDWLNGKEYKCKVSNKALPAPIEKTISKAKGQPREPQVYTLPPSRDELTKNQVSLTCLVKGFYPSDIAVEWESNGQPENNYKTTPPVLDSDGSFFLYSKLTVDKSRWQQGNVFSCSVMHEALHNHYTQKSLSLSPGK

SEQ ID NO: 1551 - protein, 248 aa, Artificial
  Synthetic
CNVNHKPSNTKVDKKVEPKSCDKKHTCGPCPAPELLGGPSVFLFPPKPKDTLMISRTPEVTCVVVDVSHEDPEVKFNWYVDGVEVHNAKTKPREEQYNSTYRVVSVLTVLHQDWLNGKEYKCKVSNKALPAPIEKTISKAKGQPREPQVYTLPPSRDELTKNQVSLTCLVKGFYPSDIAVEWESNGQPENNYKTTPPVLDSDGSFFLYSKLTVDKSRWQQGNVFSCSVMHEALHNHYTQKSLSLSPGK

SEQ ID NO: 1552 - protein, 248 aa, Artificial
  Synthetic
CNVNHKPSNTKVDKKVEPKSCDKTEECPPCPAPELLGGPSVFLFPPKPKDTLMISRTPEVTCVVVDVSHEDPEVKFNWYVDGVEVHNAKTKPREEQYNSTYRVVSVLTVLHQDWLNGKEYKCKVSNKALPAPIEKTISKAKGQPREPQVYTLPPSRDELTKNQVSLTCLVKGFYPSDIAVEWESNGQPENNYKTTPPVLDSDGSFFLYSKLTVDKSRWQQGNVFSCSVMHEALHNHYTQKSLSLSPGK

SEQ ID NO: 1553 - protein, 248 aa, Artificial
  Synthetic
CNVNHKPSNTKVDKKVEPKSCDKTETCGPCPAPELLGGPSVFLFPPKPKDTLMISRTPEVTCVVVDVSHEDPEVKFNWYVDGVEVHNAKTKPREEQYNSTYRVVSVLTVLHQDWLNGKEYKCKVSNKALPAPIEKTISKAKGQPREPQVYTLPPSRDELTKNQVSLTCLVKGFYPSDIAVEWESNGQPENNYKTTPPVLDSDGSFFLYSKLTVDKSRWQQGNVFSCSVMHEALHNHYTQKSLSLSPGK

SEQ ID NO: 1554 - protein, 248 aa, Artificial
  Synthetic
CNVNHKPSNTKVDKKVEPKSCDKTHECGPCPAPELLGGPSVFLFPPKPKDTLMISRTPEVTCVVVDVSHEDPEVKFNWYVDGVEVHNAKTKPREEQYNSTYRVVSVLTVLHQDWLNGKEYKCKVSNKALPAPIEKTISKAKGQPREPQVYTLPPSRDELTKNQVSLTCLVKGFYPSDIAVEWESNGQPENNYKTTPPVLDSDGSFFLYSKLTVDKSRWQQGNVFSCSVMHEALHNHYTQKSLSLSPGK

SEQ ID NO: 1555 - protein, 248 aa, Artificial
  Synthetic
CNVNHKPSNTKVDKKVEPKSCKKTHTCPPCPAPELLGGPDVFLFPPKPKDTLMISRTPEVTCVVVDVSHEDPEVKFNWYVDGVEVHNAKTKPREEQYNSTYRVVSVLTVLHQDWLNGKEYKCKVSNKALPAPEEKTISKAKGQPREPQVYTLPPSRDELTKNQVSLTCLVKGFYPSDIAVEWESNGQPENNYKTTPPVLDSDGSFFLYSKLTVDKSRWQQGNVFSCSVMHEALHNHYTQKSLSLSPGK

SEQ ID NO: 1556 - protein, 248 aa, Artificial
  Synthetic
CNVNHKPSNTKVDKKVEPKSCDKTHTCPPCPAPELLSGPDVFLFPPKPKDTLMISRTPEVTCVVVDVSHEDPEVKFNWYVDGVEVHNAKTKPREEQYNSTYRVVSVLTVLHQDWLNGKEYKCKVSNKALPAPEEKTISKAKGQPREPQVYTLPPSRDELTKNQVSLTCLVKGFYPSDIAVEWESNGQPENNYKTTPPVLDSDGSFFLYSKLTVDKSRWQQGNVFSCSVMHEALHNHYTQKSLSLSPGK

SEQ ID NO: 1557 - protein, 248 aa, Artificial
  Synthetic
CNVNHKPSNTKVDKKVEPKSCDKTHTCPPCPAPELLAGPDVFLFPPKPKDTLMISRTPEVTCVVVDVSHEDPEVKFNWYVDGVEVHNAKTKPREEQYNSTYRVVSVLTVLHQDWLNGKEYKCKVSNKALPAPEEKTISKAKGQPREPQVYTLPPSRDELTKNQVSLTCLVKGFYPSDIAVEWESNGQPENNYKTTPPVLDSDGSFFLYSKLTVDKSRWQQGNVFSCSVMHEALHNHYTQKSLSLSPGK

SEQ ID NO: 1558 - protein, 248 aa, Artificial
  Synthetic
CNVNHKPSNTKVDKKVEPKSCDKTHTCPPCPAPELLGGPDVFLFPPHPKDTLMISRTPEVTCVVVDVSHEDPEVKFNWYVDGVEVHNAKTKPREEQYNSTYRVVSVLTVLHQDWLNGKEYKCKVSNKALPAPEEKTISKAKGQPREPQVYTLPPSRDELTKNQVSLTCLVKGFYPSDIAVEWESNGQPENNYKTTPPVLDSDGSFFLYSKLTVDKSRWQQGNVFSCSVMHEALHNHYTQKSLSLSPGK

SEQ ID NO: 1559 - protein, 248 aa, Artificial
  Synthetic
CNVNHKPSNTKVDKKVEPKSCDKTHTCPPCPAPELLGGPDVFLFPPKPKDTLMISYTPEVTCVVVDVSHEDPEVKFNWYVDGVEVHNAKTKPREEQYNSTYRVVSVLTVLHQDWLNGKEYKCKVSNKALPAPEEKTISKAKGQPREPQVYTLPPSRDELTKNQVSLTCLVKGFYPSDIAVEWESNGQPENNYKTTPPVLDSDGSFFLYSKLTVDKSRWQQGNVFSCSVMHEALHNHYTQKSLSLSPGK

SEQ ID NO: 1560 - protein, 248 aa, Artificial; identical to SEQ ID NO: 1340
  Synthetic

SEQ ID NO: 1561 - protein, 248 aa, Artificial
  Synthetic
CNVNHKPSNTKVDKKVEPKSCDKTHTCPPCPAPELLGGPDVFLFPPKPKDTLMISRTPEVTCVVVDVSHEDPRVKFNWYVDGVEVHNAKTKPREEQYNSTYRVVSVLTVLHQDWLNGKEYKCKVSNKALPAPEEKTISKAKGQPREPQVYTLPPSRDELTKNQVSLTCLVKGFYPSDIAVEWESNGQPENNYKTTPPVLDSDGSFFLYSKLTVDKSRWQQGNVFSCSVMHEALHNHYTQKSLSLSPGK

SEQ ID NO: 1562 - protein, 248 aa, Artificial
  Synthetic
CNVNHKPSNTKVDKKVEPKSCDKTHTCPPCPAPELLGGPDVFLFPPKPKDTLMISRTPEVTCVVVDVSHEDPHVKFNWYVDGVEVHNAKTKPREEQYNSTYRVVSVLTVLHQDWLNGKEYKCKVSNKALPAPEEKTISKAKGQPREPQVYTLPPSRDELTKNQVSLTCLVKGFYPSDIAVEWESNGQPENNYKTTPPVLDSDGSFFLYSKLTVDKSRWQQGNVFSCSVMHEALHNHYTQKSLSLSPGK

SEQ ID NO: 1563 - protein, 248 aa, Artificial
  Synthetic
CNVNHKPSNTKVDKKVEPKSCDKTHTCPPCPAPELLGGPSVFLFPPKPKDTLMISRTPEVTCVVVDVSHEDPEVKFNWYVDDVEVHNAKTKPREEQYNSTYRVVSVLTVLHQDWLNGKEYKCKVSNKALPAPEEKTISKAKGQPREPQVYTLPPSRDELTKNQVSLTCLVKGFYPSDIAVEWESNGQPENNYKTTPPVLDSDGSFFLYSKLTVDKSRWQQGNVFSCSVMHEALHNHYTQKSLSLSPGK

SEQ ID NO: 1564 - protein, 248 aa, Artificial
  Synthetic
CNVNHKPSNTKVDKKVEPKSCDKTHTCPPCPAPELLGGPDVFLFPPKPKDTLMISRTPEVTCVVVDVSHEDPEVKFNWYVDGVHVHNAKTKPREEQYNSTYRVVSVLTVLHQDWLNGKEYKCKVSNKALPAPEEKTISKAKGQPREPQVYTLPPSRDELTKNQVSLTCLVKGFYPSDIAVEWESNGQPENNYKTTPPVLDSDGSFFLYSKLTVDKSRWQQGNVFSCSVMHEALHNHYTQKSLSLSPGK

SEQ ID NO: 1565 - protein, 248 aa, Artificial
  Synthetic
CNVNHKPSNTKVDKKVEPKSCDKTHTCPPCPAPELLGGPDVFLFPPKPKDTLMISRTPEVTCVVVDVSHEDPEVKFNWYVDGVLVHNAKTKPREEQYNSTYRVVSVLTVLHQDWLNGKEYKCKVSNKALPAPEEKTISKAKGQPREPQVYTLPPSRDELTKNQVSLTCLVKGFYPSDIAVEWESNGQPENNYKTTPPVLDSDGSFFLYSKLTVDKSRWQQGNVFSCSVMHEALHNHYTQKSLSLSPGK

SEQ ID NO: 1566 - protein, 248 aa, Artificial
  Synthetic
CNVNHKPSNTKVDKKVEPKSCDKTHTCPPCPAPELLGGPSVFLFPPKPKDTLMISRTPEVTCVVVDVSHEDPEVKFNWYVDGVEEHNAKTKPREEQYNSTYRVVSVLTVLHQDWLNGKEYKCKVSNKALPAPEEKTISKAKGQPREPQVYTLPPSRDELTKNQVSLTCLVKGFYPSDIAVEWESNGQPENNYKTTPPVLDSDGSFFLYSKLTVDKSRWQQGNVFSCSVMHEALHNHYTQKSLSLSPGK

SEQ ID NO: 1567 - protein, 248 aa, Artificial
  Synthetic
CNVNHKPSNTKVDKKVEPKSCDKTHTCPPCPAPELLGGPDVFLFPPKPKDTLMISRTPEVTCVVVDVSHEDPEVKFNWYVDGVEEHNAKTKPREEQYNSTYRVVSVLTVLHQDWLNGKEYKCKVSNKALPAPEEKTISKAKGQPREPQVYTLPPSRDELTKNQVSLTCLVKGFYPSDIAVEWESNGQPENNYKTTPPVLDSDGSFFLYSKLTVDKSRWQQGNVFSCSVMHEALHNHYTQKSLSLSPGK

SEQ ID NO: 1568 - protein, 248 aa, Artificial
  Synthetic
CNVNHKPSNTKVDKKVEPKSCDKTHTCPPCPAPELLGGPSVFLFPPKPKDTLMISRTPEVTCVVVDVEHEDPEVKFNWYVDGVEVHNAKTKPREEQYNSTYRVVSVLTVLHQDWLNGKEYKCKVINKALPAPIEKTISKAKGQPREPQVYTLPPSRDELTKNQVSLTCLVKGFYPSDIAVEWESNGQPENNYKTTPPVLDSDGSFFLYSKLTVDKSRWQQGNVFSCSVMHEALHNHYTQKSLSLSPGK

SEQ ID NO: 1569 - protein, 248 aa, Artificial
  Synthetic
CNVNHKPSNTKVDKKVEPKSCDKTHTCPPCPAPELLGGPSVFLFPPKPKDTLMISRTPEVTCVVVDVEHEDPEVKFNWYVDGVEVHNAKTKPREEQYNSTYRVVSVLTVLHQDWLNGKEYKCKVSNKDLPAPIEKTISKAKGQPREPQVYTLPPSRDELTKNQVSLTCLVKGFYPSDIAVEWESNGQPENNYKTTPPVLDSDGSFFLYSKLTVDKSRWQQGNVFSCSVMHEALHNHYTQKSLSLSPGK

SEQ ID NO: 1570 - protein, 248 aa, Artificial
  Synthetic
CNVNHKPSNTKVDKKVEPKSCDKTHTCPPCPAPELLGGPSVFLFPPKPKDTLMISRTPEVTCVVVDVSHEDPEVKFNWYVDGVEVHNAKTKPREEQYNSTYRVVSVLTVLHQDWLNGKEYKCKVINKDLPAPIEKTISKAKGQPREPQVYTLPPSRDELTKNQVSLTCLVKGFYPSDIAVEWESNGQPENNYKTTPPVLDSDGSFFLYSKLTVDKSRWQQGNVFSCSVMHEALHNHYTQKSLSLSPGK

SEQ ID NO: 1571 - protein, 248 aa, Artificial
  Synthetic
CNVNHKPSNTKVDKKVEPKSCDKTHTCPPCPAPELLGGPSVFLFPPKPKDTLMISRTPEVTCVVVDVEHEDPEVKFNWYVDGVEVHNAKTKPREEQYNSTYRVVSVLTVLHQDWLNGKEYKCKVSNKALPADIEKTISKAKGQPREPQVYTLPPSRDELTKNQVSLTCLVKGFYPSDIAVEWESNGQPENNYKTTPPVLDSDGSFFLYSKLTVDKSRWQQGNVFSCSVMHEALHNHYTQKSLSLSPGK

SEQ ID NO: 1572 - protein, 248 aa, Artificial
  Synthetic
CNVNHKPSNTKVDKKVEPKSCDKTHTCPPCPAPELLGGPSVFLFPPKPKDTLMISRTPEVTCVVVDVEHEDPEVKFNWYVDGGEVHNAKTKPREEQYNSTYRVVSVLTVLHQDWLNGKEYKCKVSNKALPAPIEKTISKAKGQPREPQVYTLPPSRDELTKNQVSLTCLVKGFYPSDIAVEWESNGQPENNYKTTPPVLDSDGSFFLYSKLTVDKSRWQQGNVFSCSVMHEALHNHYTQKSLSLSPGK

SEQ ID NO: 1573 - protein, 248 aa, Artificial
  Synthetic
CNVNHKPSNTKVDKKVEPKSCDKTHTCPPCPAPELLGGPSVFLFPPKPKDTLMISRTPEVTCVVVDVSHEDPEVKFNWYVDDGEVHNAKTKPREEQYNSTYRVVSVLTVLHQDWLNGKEYKCKVSNKALPAPIEKTISKAKGQPREPQVYTLPPSRDELTKNQVSLTCLVKGFYPSDIAVEWESNGQPENNYKTTPPVLDSDGSFFLYSKLTVDKSRWQQGNVFSCSVMHEALHNHYTQKSLSLSPGK

SEQ ID NO: 1574 - protein, 248 aa, Artificial
  Synthetic
CNVNHKPSNTKVDKKVEPKSCDKTHTCPPCPAPELLGGPSVFLFPPKPKDTLMISRTPEVTCVVVDVSHEDPEVKFNWYVDGGEVHNAKTKPREEQYNSTYRVVSVLTVLHQDWLNGKEYKCKVSNKALPADIEKTISKAKGQPREPQVYTLPPSRDELTKNQVSLTCLVKGFYPSDIAVEWESNGQPENNYKTTPPVLDSDGSFFLYSKLTVDKSRWQQGNVFSCSVMHEALHNHYTQKSLSLSPGK

SEQ ID NO: 1575 - protein, 248 aa, Artificial
  Synthetic
CNVNHKPSNTKVDKKVEPKSCDKTHTCPPCPAPELLGGPSVFLFPPKPKDTLMISRTPEVTCVVVDVSHEDPEVKFNWYVDEVEVHNAKTKPREEQYNSTYRVVSVLTVLHQDWLNGKEYKCKVSNKALPAPIEKTISKAKGQPREPQVYTLPPSRDELTKNQVSLTCLVKGFYPSDIAVEWESNGQPENNYKTTPPVLDSDGSFFLYSKLTVDKSRWQQGNVFSCSVMHEALHNHYTQKSLSLSPGK

SEQ ID NO: 1576 - protein, 248 aa, Artificial
  Synthetic
CNVNHKPSNTKVDKKVEPKSCDKTHTCPPCPAPELLGGPSVFLFPPKPKDTLMISRTPEVTCVVVDVSHEDPEVKFNWYVDNVEVHNAKTKPREEQYNSTYRVVSVLTVLHQDWLNGKEYKCKVSNKALPAPIEKTISKAKGQPREPQVYTLPPSRDELTKNQVSLTCLVKGFYPSDIAVEWESNGQPENNYKTTPPVLDSDGSFFLYSKLTVDKSRWQQGNVFSCSVMHEALHNHYTQKSLSLSPGK

SEQ ID NO: 1577 - protein, 248 aa, Artificial
  Synthetic
CNVNHKPSNTKVDKKVEPKSCDKTHTCPPCPAPELLGGPSVFLFPPKPKDTLMISRTPEVTCVVVDVSHEDPEVKFNWYVDQVEVHNAKTKPREEQYNSTYRVVSVLTVLHQDWLNGKEYKCKVSNKALPAPIEKTISKAKGQPREPQVYTLPPSRDELTKNQVSLTCLVKGFYPSDIAVEWESNGQPENNYKTTPPVLDSDGSFFLYSKLTVDKSRWQQGNVFSCSVMHEALHNHYTQKSLSLSPGK

SEQ ID NO: 1578 - protein, 248 aa, Artificial
  Synthetic
CNVNHKPSNTKVDKKVEPKSCDKTHTCPPCPAPELLGGPSVFLFPPKPKDTLMISRTPEVTCVVVDVSHEDPEVKFNWYVDGVEDHNAKTKPREEQYNSTYRVVSVLTVLHQDWLNGKEYKCKVSNKALPAPIEKTISKAKGQPREPQVYTLPPSRDELTKNQVSLTCLVKGFYPSDIAVEWESNGQPENNYKTTPPVLDSDGSFFLYSKLTVDKSRWQQGNVFSCSVMHEALHNHYTQKSLSLSPGK

SEQ ID NO: 1579 - protein, 248 aa, Artificial
  Synthetic
CNVNHKPSNTKVDKKVEPKSCDKTHTCPPCPAPELLGGPSVFLFPPKPKDTLMISRTPEVTCVVVDVSHEDPEVKFNWYVDGVEQHNAKTKPREEQYNSTYRVVSVLTVLHQDWLNGKEYKCKVSNKALPAPIEKTISKAKGQPREPQVYTLPPSRDELTKNQVSLTCLVKGFYPSDIAVEWESNGQPENNYKTTPPVLDSDGSFFLYSKLTVDKSRWQQGNVFSCSVMHEALHNHYTQKSLSLSPGK

SEQ ID NO: 1580 - protein, 248 aa, Artificial
  Synthetic
CNVNHKPSNTKVDKKVEPKSCDKTHTCPPCPAPELLGGPSVFLFPPKPKDTLMISRTPEVTCVVVDVSHEDPEVKFNWYVDGVEVHNAKTKPREEQYNATYRVVSVLTVLHQDWLNGKEYKCKVSNEALPAPIEKTISKAKGQPREPQVYTLPPSRDELTKNQVSLTCLVKGFYPSDIAVEWESNGQPENNYKTTPPVLDSDGSFFLYSKLTVDKSRWQQGNVFSCSVMHEALHNHYTQKSLSLSPGK

SEQ ID NO: 1581 - protein, 248 aa, Artificial
  Synthetic
CNVNHKPSNTKVDKKVEPKSCDKTHTCPPCPAPELLGGPSVFLFPPKPKDTLMISRTPEVTCVVVDVSHEDPEVKFNWYVDGVEVHNAKTKPREEQYNATYRVVSVLTVLHQDWLNGKEYKCKVSNKALPAPIELTISKAKGQPREPQVYTLPPSRDELTKNQVSLTCLVKGFYPSDIAVEWESNGQPENNYKTTPPVLDSDGSFFLYSKLTVDKSRWQQGNVFSCSVMHEALHNHYTQKSLSLSPGK

SEQ ID NO: 1582 - protein, 248 aa, Artificial
  Synthetic
CNVNHKPSNTKVDKKVEPKSCDKTHTCPPCPAPELLGGPSVFLFPPKPKDTLMISRTPEVTCVVVDVSHEDPEVKFNWYVDGVEVHNAKTKPREEQYNATYRVVSVLTVLHQDWLNGKEYKCKVSNEALPAPIELTISKAKGQPREPQVYTLPPSRDELTKNQVSLTCLVKGFYPSDIAVEWESNGQPENNYKTTPPVLDSDGSFFLYSKLTVDKSRWQQGNVFSCSVMHEALHNHYTQKSLSLSPGK

SEQ ID NO: 1583 - protein, 248 aa, Artificial
  Synthetic
CNVNHKPSNTKVDKKVEPKSCDKTHTCPPCPAPELLGGPDVFLFPPKPKDTLMISRTPEVHCVVVDVSHEDPEVKFNWYVDGVEVHNAKTKPREEQYNSTYRVVSVLTVLHQDWLNGKEYKCKVSNKALPAPEEKTISKAKGQPREPQVYTLPPSRDELTKNQVSLTCLVKGFYPSDIAVEWESNGQPENNYKTTPPVLDSDGSFFLYSKLTVDKSRWQQGNVFSCSVMHEALHNHYTQKSLSLSPGK

SEQ ID NO: 1584 - protein, 248 aa, Artificial
  Synthetic
CNVNHKPSNTKVDKKVEPKSCDKTHTCPPCPAPELLGGPDVFLFPPKPKDTLMISRTPEVTCVVVDVSDEDPEVKFNWYVDGVEVHNAKTKPREEQYNSTYRVVSVLTVLHQDWLNGKEYKCKVSNKALPAPEEKTISKAKGQPREPQVYTLPPSRDELTKNQVSLTCLVKGFYPSDIAVEWESNGQPENNYKTTPPVLDSDGSFFLYSKLTVDKSRWQQGNVFSCSVMHEALHNHYTQKSLSLSPGK

SEQ ID NO: 1585 - protein, 248 aa, Artificial
  Synthetic
CNVNHKPSNTKVDKKVEPKSCDKTHTCPPCPAPELLGGPDVFLFPPKPKDTLMISRTPEVTCVVVDVSEEDPEVKFNWYVDGVEVHNAKTKPREEQYNSTYRVVSVLTVLHQDWLNGKEYKCKVSNKALPAPEEKTISKAKGQPREPQVYTLPPSRDELTKNQVSLTCLVKGFYPSDIAVEWESNGQPENNYKTTPPVLDSDGSFFLYSKLTVDKSRWQQGNVFSCSVMHEALHNHYTQKSLSLSPGK

SEQ ID NO: 1586 - protein, 248 aa, Artificial
  Synthetic
CNVNHKPSNTKVDKKVEPKSCDKTHTCPPCPAPELLGGPDVFLFPPKPKDTLMISRTPEVTCVVVDVSHEDPEVKFNWYVDGVEVHNAKTKPREEQYNSTYRVVSVLTVLHQDWLNGKEYKCKVGNKALPAPEEKTISKAKGQPREPQVYTLPPSRDELTKNQVSLTCLVKGFYPSDIAVEWESNGQPENNYKTTPPVLDSDGSFFLYSKLTVDKSRWQQGNVFSCSVMHEALHNHYTQKSLSLSPGK

SEQ ID NO: 1587 - protein, 248 aa, Artificial
  Synthetic
CNVNHKPSNTKVDKKVEPKSCDKTHTCPPCPAPELLGGPDVFLFPPKPKDTLMISRTPEVTCVVVDVSHEDPEVKFNWYVDGVEVHNAKTKPREEQYNSTYRVVSVLTVLHQDWLNGKEYKCKVINKALPAPEEKTISKAKGQPREPQVYTLPPSRDELTKNQVSLTCLVKGFYPSDIAVEWESNGQPENNYKTTPPVLDSDGSFFLYSKLTVDKSRWQQGNVFSCSVMHEALHNHYTQKSLSLSPGK

SEQ ID NO: 1588 - protein, 248 aa, Artificial
  Synthetic
CNVNHKPSNTKVDKKVEPKSCDKTHTCPPCPAPELLGGPDVFLFPPKPKDTLMISRTPEVTCVVVDVSHEDPEVKFNWYVDGVEVHNAKTKPREEQYNSTYRVVSVLTVLHQDWLNGKEYKCKVSNAALPAPEEKTISKAKGQPREPQVYTLPPSRDELTKNQVSLTCLVKGFYPSDIAVEWESNGQPENNYKTTPPVLDSDGSFFLYSKLTVDKSRWQQGNVFSCSVMHEALHNHYTQKSLSLSPGK

SEQ ID NO: 1589 - protein, 248 aa, Artificial
  Synthetic
CNVNHKPSNTKVDKKVEPKSCDKTHTCPPCPAPELLGGPDVFLFPPKPKDTLMISRTPEVTCVVVDVSHEDPEVKFNWYVDGVEVHNAKTKPREEQYNSTYRVVSVLTVLHQDWLNGKEYKCKVSNKALPAPEAKTISKAKGQPREPQVYTLPPSRDELTKNQVSLTCLVKGFYPSDIAVEWESNGQPENNYKTTPPVLDSDGSFFLYSKLTVDKSRWQQGNVFSCSVMHEALHNHYTQKSLSLSPGK

SEQ ID NO: 1590 - protein, 248 aa, Artificial
  Synthetic
CNVNHKPSNTKVDKKVEPKSCDKTHTCPPCPAPELLGGPDVFLFPPKPKDTLMISRTPEVTCVVVDVSHEDPEVKFNWYVDGVEVHNAKTKPREEQYNSTYRVVSVLTVLHQDWLNGKEYKCKVSNKALPAPEYKTISKAKGQPREPQVYTLPPSRDELTKNQVSLTCLVKGFYPSDIAVEWESNGQPENNYKTTPPVLDSDGSFFLYSKLTVDKSRWQQGNVFSCSVMHEALHNHYTQKSLSLSPGK

SEQ ID NO: 1591 - protein, 248 aa, Artificial
  Synthetic
CNVNHKPSNTKVDKKVEPKSCDKTHTCPPCPAPELLGGPDVFLFPPKPKDTLMISRTPEVTCVVVDVSHEDPEVKFNWYVDGVEVHNAKTKPREEQYNSTYRVVSVLTVLHQDWLNGKEYKCKVSNKALPAPEEATISKAKGQPREPQVYTLPPSRDELTKNQVSLTCLVKGFYPSDIAVEWESNGQPENNYKTTPPVLDSDGSFFLYSKLTVDKSRWQQGNVFSCSVMHEALHNHYTQKSLSLSPGK

SEQ ID NO: 1592 - protein, 248 aa, Artificial
  Synthetic
CNVNHKPSNTKVDKKVEPKSCDKTHTCPPCPAPELLGGPDVFLFPPKPKDTLMISRTPEVTCVVVDVSHEDPEVKFNWYVDGVEVHNAKTKPREEQYNSTYRVVSVLTVLHQDWLNGKEYKCKVSNKALPAPEEITISKAKGQPREPQVYTLPPSRDELTKNQVSLTCLVKGFYPSDIAVEWESNGQPENNYKTTPPVLDSDGSFFLYSKLTVDKSRWQQGNVFSCSVMHEALHNHYTQKSLSLSPGK

SEQ ID NO: 1593 - protein, 248 aa, Artificial
  Synthetic
CNVNHKPSNTKVDKKVEPKSCDKTHTCPPCPAPELLGGPDVFLFPPKPKDTLMISRTPEVTCVVVDVSHEDPEVKFNWYVDGVEVHNAKTKPREEQYNSTYRVVSVLTVLHQDWLNGKEYKCKVSNKALPAPEETTISKAKGQPREPQVYTLPPSRDELTKNQVSLTCLVKGFYPSDIAVEWESNGQPENNYKTTPPVLDSDGSFFLYSKLTVDKSRWQQGNVFSCSVMHEALHNHYTQKSLSLSPGK

SEQ ID NO: 1594 - protein, 9 aa, Artificial
  Synthetic
HFPEPVTVS

SEQ ID NO: 1595 - protein, 9 aa, Artificial
  Synthetic
YWPEPVTVS

SEQ ID NO: 1596 - protein, 9 aa, Artificial
  Synthetic
YFPSPVTVS

SEQ ID NO: 1597 - protein, 9 aa, Artificial
  Synthetic
YFPNPVTVS

SEQ ID NO: 1598 - protein, 9 aa, Artificial
  Synthetic
YFPQPVTVS

SEQ ID NO: 1599 - protein, 9 aa, Artificial
  Synthetic
YFPRPVTVS

SEQ ID NO: 1600 - protein, 9 aa, Artificial
  Synthetic
YFPKPVTVS

SEQ ID NO: 1601 - protein, 9 aa, Artificial
  Synthetic
YFPEPATVS

SEQ ID NO: 1602 - protein, 9 aa, Artificial
  Synthetic
YFPEPMTVS

SEQ ID NO: 1603 - protein, 9 aa, Artificial
  Synthetic
YFPEPITVS

SEQ ID NO: 1604 - protein, 9 aa, Artificial
  Synthetic
YFPEPLTVS

SEQ ID NO: 1605 - protein, 9 aa, Artificial
  Synthetic
YFPEPVTVT

SEQ ID NO: 1606 - protein, 9 aa, Artificial
  Synthetic
YFPEPVTVA

SEQ ID NO: 1607 - protein, 9 aa, Artificial
  Synthetic
YFPEPVTVG

SEQ ID NO: 1608 - protein, 9 aa, Artificial
  Synthetic
YFPEPVTVN

SEQ ID NO: 1609 - protein, 9 aa, Artificial
  Synthetic
YFPEPVTVD

SEQ ID NO: 1610 - protein, 9 aa, Artificial
  Synthetic
YFPEPVTVE

SEQ ID NO: 1611 - protein, 9 aa, Artificial
  Synthetic
YFPEPVTVK

SEQ ID NO: 1612 - protein, 9 aa, Artificial
  Synthetic
YFPHPVTVQ

SEQ ID NO: 1613 - protein, 9 aa, Artificial
  Synthetic
LMLSRTPEV

SEQ ID NO: 1614 - protein, 9 aa, Artificial
  Synthetic
LMVSRTPEV

SEQ ID NO: 1615 - protein, 9 aa, Artificial
  Synthetic
LMFSRTPEV

SEQ ID NO: 1616 - protein, 9 aa, Artificial
  Synthetic
LMITRTPEV

SEQ ID NO: 1617 - protein, 9 aa, Artificial
  Synthetic
LMIARTPEV

SEQ ID NO: 1618 - protein, 9 aa, Artificial
  Synthetic
LMINRTPEV

SEQ ID NO: 1619 - protein, 9 aa, Artificial
  Synthetic
LMIERTPEV

SEQ ID NO: 1620 - protein, 9 aa, Artificial
  Synthetic
LMIQRTPEV

SEQ ID NO: 1621 - protein, 9 aa, Artificial
  Synthetic
LMIKRTPEV

SEQ ID NO: 1622 - protein, 9 aa, Artificial
  Synthetic
LMISRSPEV

SEQ ID NO: 1623 - protein, 9 aa, Artificial
  Synthetic
LMISRAPEV

SEQ ID NO: 1624 - protein, 9 aa, Artificial
  Synthetic
LMISRNPEV

SEQ ID NO: 1625 - protein, 9 aa, Artificial
  Synthetic
LMISRTPET

SEQ ID NO: 1626 - protein, 9 aa, Artificial
  Synthetic
FFISRTPEV

SEQ ID NO: 1627 - protein, 9 aa, Artificial
  Synthetic
FMIGRTPEV

SEQ ID NO: 1628 - protein, 9 aa, Artificial
  Synthetic
LLISRTPEL

SEQ ID NO: 1629 - protein, 9 aa, Artificial
  Synthetic
LFIGRTPEV

SEQ ID NO: 1630 - protein, 9 aa, Artificial
  Synthetic
LFISRTPEA

SEQ ID NO: 1631 - protein, 9 aa, Artificial
  Synthetic
LFISRTPEL

SEQ ID NO: 1632 - protein, 9 aa, Artificial
  Synthetic
LMMSRTPEL

SEQ ID NO: 1633 - protein, 9 aa, Artificial
  Synthetic
LMIGRTPEA

SEQ ID NO: 1634 - protein, 9 aa, Artificial
  Synthetic
LMIGRTPEL

SEQ ID NO: 1635 - protein, 9 aa, Artificial
  Synthetic
WWVDGVEVH

SEQ ID NO: 1636 - protein, 9 aa, Artificial
  Synthetic
WYTDGVEVH

SEQ ID NO: 1637 - protein, 9 aa, Artificial
  Synthetic
WYADGVEVH

SEQ ID NO: 1638 - protein, 9 aa, Artificial
  Synthetic
WYVSGVEVH

SEQ ID NO: 1639 - protein, 9 aa, Artificial
  Synthetic
WYVNGVEVH

SEQ ID NO: 1640 - protein, 9 aa, Artificial
  Synthetic
WYVQGVEVH

SEQ ID NO: 1641 - protein, 9 aa, Artificial
  Synthetic
WYVDGAEVH

SEQ ID NO: 1642 - protein, 9 aa, Artificial
  Synthetic
WYVDGMEVH

SEQ ID NO: 1643 - protein, 9 aa, Artificial
  Synthetic
WYVDGIEVH

SEQ ID NO: 1644 - protein, 9 aa, Artificial
  Synthetic
WYVDGLEVH

SEQ ID NO: 1645 - protein, 9 aa, Artificial
  Synthetic
WYVDGVSVH

SEQ ID NO: 1646 - protein, 9 aa, Artificial
  Synthetic
WYVDGVDVH

SEQ ID NO: 1647 - protein, 9 aa, Artificial
  Synthetic
WYVDGVRVH

SEQ ID NO: 1648 - protein, 9 aa, Artificial
  Synthetic
WYVDGVKVH

SEQ ID NO: 1649 - protein, 9 aa, Artificial
  Synthetic
WYVDGVEVN

SEQ ID NO: 1650 - protein, 9 aa, Artificial
  Synthetic
WYVDGVEVE

SEQ ID NO: 1651 - protein, 9 aa, Artificial
  Synthetic
WYVDGVEVR

SEQ ID NO: 1652 - protein, 9 aa, Artificial
  Synthetic
WYVDGVEVY

SEQ ID NO: 1653 - protein, 9 aa, Artificial
  Synthetic
HRVVSVLTV

SEQ ID NO: 1654 - protein, 9 aa, Artificial
  Synthetic
YEVVSVLTV

SEQ ID NO: 1655 - protein, 9 aa, Artificial
  Synthetic
YNTVSVLTV

SEQ ID NO: 1656 - protein, 9 aa, Artificial
  Synthetic
YNAVSVLTV

SEQ ID NO: 1657 - protein, 9 aa, Artificial
  Synthetic
YNVASVLTV

SEQ ID NO: 1658 - protein, 9 aa, Artificial
  Synthetic
YNVVSTLTV

SEQ ID NO: 1659 - protein, 9 aa, Artificial
  Synthetic
YNVVSALTV

SEQ ID NO: 1660 - protein, 9 aa, Artificial
  Synthetic
YNVVSMLTV

SEQ ID NO: 1661 - protein, 9 aa, Artificial
  Synthetic
YNVVSILTV

SEQ ID NO: 1662 - protein, 9 aa, Artificial
  Synthetic
YNVVSLLTV

SEQ ID NO: 1663 - protein, 9 aa, Artificial
  Synthetic
YNVVSVVTV

SEQ ID NO: 1664 - protein, 9 aa, Artificial
  Synthetic
YNVVSVLTT

SEQ ID NO: 1665 - protein, 9 aa, Artificial
  Synthetic
YQVVSMLTV

SEQ ID NO: 1666 - protein, 9 aa, Artificial
  Synthetic
YQVVSLLTV

SEQ ID NO: 1667 - protein, 9 aa, Artificial
  Synthetic
YQVVSVVTV

SEQ ID NO: 1668 - protein, 9 aa, Artificial
  Synthetic
YHTVSVLTV

SEQ ID NO: 1669 - protein, 9 aa, Artificial
  Synthetic
YHAVSVLTV

SEQ ID NO: 1670 - protein, 9 aa, Artificial
  Synthetic
YHVASVLTV

SEQ ID NO: 1671 - protein, 9 aa, Artificial
  Synthetic
YHVVSTLTV

SEQ ID NO: 1672 - protein, 9 aa, Artificial
  Synthetic
YHVVSALTV

SEQ ID NO: 1673 - protein, 9 aa, Artificial
  Synthetic
YHVVSMLTV

SEQ ID NO: 1674 - protein, 9 aa, Artificial
  Synthetic
YHVVSILTV

SEQ ID NO: 1675 - protein, 9 aa, Artificial
  Synthetic
YHVVSLLTV

SEQ ID NO: 1676 - protein, 9 aa, Artificial
  Synthetic
YHVVSVVTV

SEQ ID NO: 1677 - protein, 9 aa, Artificial
  Synthetic
YHVVSVLTT

SEQ ID NO: 1678 - protein, 9 aa, Artificial
  Synthetic
YKVVSMLTV

SEQ ID NO: 1679 - protein, 9 aa, Artificial
  Synthetic
YKVVSLLTV

SEQ ID NO: 1680 - protein, 9 aa, Artificial
  Synthetic
YKVVSVVTV

SEQ ID NO: 1681 - protein, 9 aa, Artificial
  Synthetic
YRVVSMVTV

SEQ ID NO: 1682 - protein, 9 aa, Artificial
  Synthetic
YRVVSLVTV

SEQ ID NO: 1683 - protein, 9 aa, Artificial
  Synthetic
YRVVSVVTT

SEQ ID NO: 1684 - protein, 9 aa, Artificial
  Synthetic
YRVVSVFTT

SEQ ID NO: 1685 - protein, 9 aa, Artificial
  Synthetic
YQTVSILTV

SEQ ID NO: 1686 - protein, 9 aa, Artificial
  Synthetic
YQAVSILTV

SEQ ID NO: 1687 - protein, 9 aa, Artificial
  Synthetic
YQVASILTV

SEQ ID NO: 1688 - protein, 9 aa, Artificial
  Synthetic
YQVVSIMTV

SEQ ID NO: 1689 - protein, 9 aa, Artificial
  Synthetic
YQVVSIITV

SEQ ID NO: 1690 - protein, 9 aa, Artificial
  Synthetic
YQVVSILTT

SEQ ID NO: 1691 - protein, 9 aa, Artificial
  Synthetic
YKTVSILTV

SEQ ID NO: 1692 - protein, 9 aa, Artificial
  Synthetic
YKTVSVMTV

SEQ ID NO: 1693 - protein, 9 aa, Artificial
  Synthetic
YKTVSVITV

SEQ ID NO: 1694 - protein, 9 aa, Artificial
  Synthetic
YKAVSILTV

SEQ ID NO: 1695 - protein, 9 aa, Artificial
  Synthetic
YKAVSVMTV

SEQ ID NO: 1696 - protein, 9 aa, Artificial
  Synthetic
YKAVSVITV

SEQ ID NO: 1697 - protein, 9 aa, Artificial
  Synthetic
YKVASILTV

SEQ ID NO: 1698 - protein, 9 aa, Artificial
  Synthetic
YKVASVMTV

SEQ ID NO: 1699 - protein, 9 aa, Artificial
  Synthetic
YKVASVITV

SEQ ID NO: 1700 - protein, 9 aa, Artificial
  Synthetic
YKVVSAMTV

SEQ ID NO: 1701 - protein, 9 aa, Artificial
  Synthetic
YKVVSIMTV

SEQ ID NO: 1702 - protein, 9 aa, Artificial
  Synthetic
YKVVSIITV

SEQ ID NO: 1703 - protein, 9 aa, Artificial
  Synthetic
YKVVSIFTV

SEQ ID NO: 1704 - protein, 9 aa, Artificial
  Synthetic
YKVVSILTT

SEQ ID NO: 1705 - protein, 9 aa, Artificial
  Synthetic
YKVVSVMTT

SEQ ID NO: 1706 - protein, 9 aa, Artificial
  Synthetic
YKVVSVITT

SEQ ID NO: 1707 - protein, 9 aa, Artificial
  Synthetic
YRTVSMMTV

SEQ ID NO: 1708 - protein, 9 aa, Artificial
  Synthetic
YRTVSIVTV

SEQ ID NO: 1709 - protein, 9 aa, Artificial
  Synthetic
YRTVSVITT

SEQ ID NO: 1710 - protein, 9 aa, Artificial
  Synthetic
YRAVSMMTV

SEQ ID NO: 1711 - protein, 9 aa, Artificial
  Synthetic
YRAVSIVTV

SEQ ID NO: 1712 - protein, 9 aa, Artificial
  Synthetic
YRAVSVITT

SEQ ID NO: 1713 - protein, 9 aa, Artificial
  Synthetic
YRVTSILTT

SEQ ID NO: 1714 - protein, 9 aa, Artificial
  Synthetic
YRVASMITV

SEQ ID NO: 1715 - protein, 9 aa, Artificial
  Synthetic
YRVASIVTV

SEQ ID NO: 1716 - protein, 9 aa, Artificial
  Synthetic
YRVVSMMTT

SEQ ID NO: 1717 - protein, 9 aa, Artificial
  Synthetic
YRVVSMITT

SEQ ID NO: 1718 - protein, 9 aa, Artificial
  Synthetic
YRVVSMITA

SEQ ID NO: 1719 - protein, 9 aa, Artificial
  Synthetic
YRVVSIITT

SEQ ID NO: 1720 - protein, 9 aa, Artificial
  Synthetic
YRVVSIVTA

SEQ ID NO: 1721 - protein, 9 aa, Artificial
  Synthetic
YRVVSLITT

SEQ ID NO: 1722 - protein, 9 aa, Artificial
  Synthetic
FEVVSVLTV

SEQ ID NO: 1723 - protein, 9 aa, Artificial
  Synthetic
FNTVSVLTV

SEQ ID NO: 1724 - protein, 9 aa, Artificial
  Synthetic
FNAVSVLTV

SEQ ID NO: 1725 - protein, 9 aa, Artificial
  Synthetic
FNVASVLTV

SEQ ID NO: 1726 - protein, 9 aa, Artificial
  Synthetic
FNVVSTLTV

SEQ ID NO: 1727 - protein, 9 aa, Artificial
  Synthetic
FNVVSALTV

SEQ ID NO: 1728 - protein, 9 aa, Artificial
  Synthetic
FNVVSMLTV

SEQ ID NO: 1729 - protein, 9 aa, Artificial
  Synthetic
FNVVSILTV

SEQ ID NO: 1730 - protein, 9 aa, Artificial
  Synthetic
FNVVSLLTV

SEQ ID NO: 1731 - protein, 9 aa, Artificial
  Synthetic
FNVVSVVTV

SEQ ID NO: 1732 - protein, 9 aa, Artificial
  Synthetic
FNVVSVLTT

SEQ ID NO: 1733 - protein, 9 aa, Artificial
  Synthetic
FQVVSMLTV

SEQ ID NO: 1734 - protein, 9 aa, Artificial
  Synthetic
FQVVSLLTV

SEQ ID NO: 1735 - protein, 9 aa, Artificial
  Synthetic
FQVVSVVTV

SEQ ID NO: 1736 - protein, 9 aa, Artificial
  Synthetic
FHTVSVLTV

SEQ ID NO: 1737 - protein, 9 aa, Artificial
  Synthetic
FHAVSVLTV

SEQ ID NO: 1738 - protein, 9 aa, Artificial
  Synthetic
FHVASVLTV

SEQ ID NO: 1739 - protein, 9 aa, Artificial
  Synthetic
FHVVSTLTV

SEQ ID NO: 1740 - protein, 9 aa, Artificial
  Synthetic
FHVVSALTV

SEQ ID NO: 1741 - protein, 9 aa, Artificial
  Synthetic
FHVVSMLTV

SEQ ID NO: 1742 - protein, 9 aa, Artificial
  Synthetic
FHVVSILTV

SEQ ID NO: 1743 - protein, 9 aa, Artificial
  Synthetic
FHVVSLLTV

SEQ ID NO: 1744 - protein, 9 aa, Artificial
  Synthetic
FHVVSVVTV

SEQ ID NO: 1745 - protein, 9 aa, Artificial
  Synthetic
FHVVSVLTT

SEQ ID NO: 1746 - protein, 9 aa, Artificial
  Synthetic
FKVVSMLTV

SEQ ID NO: 1747 - protein, 9 aa, Artificial
  Synthetic
FKVVSLLTV

SEQ ID NO: 1748 - protein, 9 aa, Artificial
  Synthetic
FKVVSVVTV

SEQ ID NO: 1749 - protein, 9 aa, Artificial
  Synthetic
FRVVSMVTV

SEQ ID NO: 1750 - protein, 9 aa, Artificial
  Synthetic
FRVVSLVTV

SEQ ID NO: 1751 - protein, 9 aa, Artificial
  Synthetic
FRVVSVVTT

SEQ ID NO: 1752 - protein, 9 aa, Artificial
  Synthetic
FRVVSVFTT

SEQ ID NO: 1753 - protein, 9 aa, Artificial
  Synthetic
FQTVSILTV

SEQ ID NO: 1754 - protein, 9 aa, Artificial
  Synthetic
FQAVSILTV

SEQ ID NO: 1755 - protein, 9 aa, Artificial
  Synthetic
FQVASILTV

SEQ ID NO: 1756 - protein, 9 aa, Artificial
  Synthetic
FQVVSIMTV

SEQ ID NO: 1757 - protein, 9 aa, Artificial
  Synthetic
FQVVSIITV

SEQ ID NO: 1758 - protein, 9 aa, Artificial
  Synthetic
FQVVSILTT

SEQ ID NO: 1759 - protein, 9 aa, Artificial
  Synthetic
FKTVSILTV

SEQ ID NO: 1760 - protein, 9 aa, Artificial
  Synthetic
FKTVSVMTV

SEQ ID NO: 1761 - protein, 9 aa, Artificial
  Synthetic
FKTVSVITV

SEQ ID NO: 1762 - protein, 9 aa, Artificial
  Synthetic
FKAVSILTV

SEQ ID NO: 1763 - protein, 9 aa, Artificial
  Synthetic
FKAVSVMTV

SEQ ID NO: 1764 - protein, 9 aa, Artificial
  Synthetic
FKAVSVITV

SEQ ID NO: 1765 - protein, 9 aa, Artificial
  Synthetic
FKVASILTV

SEQ ID NO: 1766 - protein, 9 aa, Artificial
  Synthetic
FKVASVMTV

SEQ ID NO: 1767 - protein, 9 aa, Artificial
  Synthetic
FKVASVITV

SEQ ID NO: 1768 - protein, 9 aa, Artificial
  Synthetic
FKVVSAMTV

SEQ ID NO: 1769 - protein, 9 aa, Artificial
  Synthetic
FKVVSIMTV

SEQ ID NO: 1770 - protein, 9 aa, Artificial
  Synthetic
FKVVSIITV

SEQ ID NO: 1771 - protein, 9 aa, Artificial
  Synthetic
FKVVSIFTV

SEQ ID NO: 1772 - protein, 9 aa, Artificial
  Synthetic
FKVVSILTT

SEQ ID NO: 1773 - protein, 9 aa, Artificial
  Synthetic
FKVVSVMTT

SEQ ID NO: 1774 - protein, 9 aa, Artificial
  Synthetic
FKVVSVITT

SEQ ID NO: 1775 - protein, 9 aa, Artificial
  Synthetic
FRTVSMMTV

SEQ ID NO: 1776 - protein, 9 aa, Artificial
  Synthetic
FRTVSIVTV

SEQ ID NO: 1777 - protein, 9 aa, Artificial
  Synthetic
FRTVSVITT

SEQ ID NO: 1778 - protein, 9 aa, Artificial
  Synthetic
FRAVSMMTV

SEQ ID NO: 1779 - protein, 9 aa, Artificial
  Synthetic
FRAVSIVTV

SEQ ID NO: 1780 - protein, 9 aa, Artificial
  Synthetic
FRAVSVITT

SEQ ID NO: 1781 - protein, 9 aa, Artificial
  Synthetic
FRVTSILTT

SEQ ID NO: 1782 - protein, 9 aa, Artificial
  Synthetic
FRVASMITV

SEQ ID NO: 1783 - protein, 9 aa, Artificial
  Synthetic
FRVASIVTV

SEQ ID NO: 1784 - protein, 9 aa, Artificial
  Synthetic
FRVVSMMTT

SEQ ID NO: 1785 - protein, 9 aa, Artificial
  Synthetic
FRVVSMITT

SEQ ID NO: 1786 - protein, 9 aa, Artificial
  Synthetic
FRVVSMITA

SEQ ID NO: 1787 - protein, 9 aa, Artificial
  Synthetic
FRVVSIITT

SEQ ID NO: 1788 - protein, 9 aa, Artificial
  Synthetic
FRVVSIVTA

SEQ ID NO: 1789 - protein, 9 aa, Artificial
  Synthetic
FRVVSLITT

SEQ ID NO: 1790 - protein, 9 aa, Artificial
  Synthetic
TSVLTVLHQ

SEQ ID NO: 1791 - protein, 9 aa, Artificial
  Synthetic
ASVLTVLHQ

SEQ ID NO: 1792 - protein, 9 aa, Artificial
  Synthetic
VDVLTVLHQ

SEQ ID NO: 1793 - protein, 9 aa, Artificial
  Synthetic
VSVVTVLHQ

SEQ ID NO: 1794 - protein, 9 aa, Artificial
  Synthetic
VSVFTVLHQ

SEQ ID NO: 1795 - protein, 9 aa, Artificial
  Synthetic
VSVLTALHQ

SEQ ID NO: 1796 - protein, 9 aa, Artificial
  Synthetic
VSVLTMLHQ

SEQ ID NO: 1797 - protein, 9 aa, Artificial
  Synthetic
VSVLTLLHQ

SEQ ID NO: 1798 - protein, 9 aa, Artificial
  Synthetic
VSVLTVIHQ

SEQ ID NO: 1799 - protein, 9 aa, Artificial
  Synthetic
VSVLTVVHQ

SEQ ID NO: 1800 - protein, 9 aa, Artificial
  Synthetic
VSVLTVFHQ

SEQ ID NO: 1801 - protein, 9 aa, Artificial
  Synthetic
VSVLTVLHN

SEQ ID NO: 1802 - protein, 9 aa, Artificial
  Synthetic
VSVLTVLHD

SEQ ID NO: 1803 - protein, 9 aa, Artificial
  Synthetic
VSVLTVLHE

SEQ ID NO: 1804 - protein, 9 aa, Artificial
  Synthetic
VSVLTVLHR

SEQ ID NO: 1805 - protein, 9 aa, Artificial
  Synthetic
VSVLTVLHK

SEQ ID NO: 1806 - protein, 9 aa, Artificial
  Synthetic
VSVLTVLHM

SEQ ID NO: 1807 - protein, 9 aa, Artificial
  Synthetic
VSTITVLHQ

SEQ ID NO: 1808 - protein, 9 aa, Artificial
  Synthetic
VSTLTTLHQ

SEQ ID NO: 1809 - protein, 9 aa, Artificial
  Synthetic
VSTLTILHQ

SEQ ID NO: 1810 - protein, 9 aa, Artificial
  Synthetic
VSTLTVMHQ

SEQ ID NO: 1811 - protein, 9 aa, Artificial
  Synthetic
VSTLTVLHH

SEQ ID NO: 1812 - protein, 9 aa, Artificial
  Synthetic
VSAITVLHQ

SEQ ID NO: 1813 - protein, 9 aa, Artificial
  Synthetic
VSALTTLHQ

SEQ ID NO: 1814 - protein, 9 aa, Artificial
  Synthetic
VSALTILHQ

SEQ ID NO: 1815 - protein, 9 aa, Artificial
  Synthetic
VSALTVMHQ

SEQ ID NO: 1816 - protein, 9 aa, Artificial
  Synthetic
VSALTVLHH

SEQ ID NO: 1817 - protein, 9 aa, Artificial
  Synthetic
VSVITILHQ

SEQ ID NO: 1818 - protein, 9 aa, Artificial
  Synthetic
VSVITVLHH

SEQ ID NO: 1819 - protein, 9 aa, Artificial
  Synthetic
VSVLTTLHH

SEQ ID NO: 1820 - protein, 9 aa, Artificial
  Synthetic
VSVLTIMHQ

SEQ ID NO: 1821 - protein, 9 aa, Artificial
  Synthetic
VSVLTILHH

SEQ ID NO: 1822 - protein, 9 aa, Artificial
  Synthetic
VSVLTVMHH

SEQ ID NO: 1823 - protein, 9 aa, Artificial
  Synthetic
FFLYSKVTV

SEQ ID NO: 1824 - protein, 9 aa, Artificial
  Synthetic
FWLYSELTV

SEQ ID NO: 1825 - protein, 9 aa, Artificial
  Synthetic
FFLHSELTV

SEQ ID NO: 1826 - protein, 9 aa, Artificial
  Synthetic
FFLHSQLTV

SEQ ID NO: 1827 - protein, 9 aa, Artificial
  Synthetic
FFLWSELTV

SEQ ID NO: 1828 - protein, 9 aa, Artificial
  Synthetic
FFLWSQLTV

SEQ ID NO: 1829 - protein, 9 aa, Artificial
  Synthetic
FFLWSKITV

SEQ ID NO: 1830 - protein, 9 aa, Artificial
  Synthetic
FFLWSKLTT

SEQ ID NO: 1831 - protein, 9 aa, Artificial
  Synthetic
FFVYSEITV

SEQ ID NO: 1832 - protein, 9 aa, Artificial
  Synthetic
FFLYSEITT

SEQ ID NO: 1833 - protein, 9 aa, Artificial
  Synthetic
FFLHSQLTV

SEQ ID NO: 1834 - protein, 9 aa, Artificial
  Synthetic
FFLWSQLTV

SEQ ID NO: 1835 - protein, 9 aa, Artificial
  Synthetic
FFLWSRVTV

SEQ ID NO: 1836 - protein, 9 aa, Artificial
  Synthetic
FFLYSEVTV

SEQ ID NO: 1837 - protein, 9 aa, Artificial
  Synthetic
FFLYSQVTV

SEQ ID NO: 1838 - protein, 9 aa, Artificial
  Synthetic
FFLYSHVTV

SEQ ID NO: 1839 - protein, 9 aa, Artificial
  Synthetic
FFLYSKVTV

SEQ ID NO: 1840 - protein, 9 aa, Artificial
  Synthetic
LHNHYTQKD

SEQ ID NO: 1841 - protein, 9 aa, Artificial
  Synthetic
LHNHYTQKE

SEQ ID NO: 1842 - protein, 9 aa, Artificial
  Synthetic
FHDHYTQKS

SEQ ID NO: 1843 - protein, 9 aa, Artificial
  Synthetic
FHEHYTQKS

SEQ ID NO: 1844 - protein, 9 aa, Artificial
  Synthetic
FHNYYTQKS

SEQ ID NO: 1845 - protein, 9 aa, Artificial
  Synthetic
FHNHYAQKS

SEQ ID NO: 1846 - protein, 9 aa, Artificial
  Synthetic
FHNHYTQKT

SEQ ID NO: 1847 - protein, 9 aa, Artificial
  Synthetic
FHNHYTQKG

SEQ ID NO: 1848 - protein, 9 aa, Artificial
  Synthetic
FHNHYTQKN

SEQ ID NO: 1849 - protein, 9 aa, Artificial
  Synthetic
LHSHYTDKS

SEQ ID NO: 1850 - protein, 9 aa, Artificial
  Synthetic
LHSHYTQKN

SEQ ID NO: 1851 - protein, 9 aa, Artificial
  Synthetic
LHTHYTQKT

SEQ ID NO: 1852 - protein, 9 aa, Artificial
  Synthetic
LHTHYTQKN

SEQ ID NO: 1853 - protein, 9 aa, Artificial
  Synthetic
LHGHYTQKN

SEQ ID NO: 1854 - protein, 9 aa, Artificial
  Synthetic
LHDHYSQKS

SEQ ID NO: 1855 - protein, 9 aa, Artificial
  Synthetic
LHDHYAQKS

SEQ ID NO: 1856 - protein, 9 aa, Artificial
  Synthetic
LHDHYNQKS

SEQ ID NO: 1857 - protein, 9 aa, Artificial
  Synthetic
LHDHYVQKS

SEQ ID NO: 1858 - protein, 9 aa, Artificial
  Synthetic
LHDHYTSKS

SEQ ID NO: 1859 - protein, 9 aa, Artificial
  Synthetic
LHDHYTNKS

SEQ ID NO: 1860 - protein, 9 aa, Artificial
  Synthetic
LHDHYTDKS

SEQ ID NO: 1861 - protein, 9 aa, Artificial
  Synthetic
LHDHYTEKS

SEQ ID NO: 1862 - protein, 9 aa, Artificial
  Synthetic
LHDHYTHKS

SEQ ID NO: 1863 - protein, 9 aa, Artificial
  Synthetic
LHDHYTKKS

SEQ ID NO: 1864 - protein, 9 aa, Artificial
  Synthetic
LHDHYTQKT

SEQ ID NO: 1865 - protein, 9 aa, Artificial
  Synthetic
LHDHYTQKA

SEQ ID NO: 1866 - protein, 9 aa, Artificial
  Synthetic
LHDHYTQKG

SEQ ID NO: 1867 - protein, 9 aa, Artificial
  Synthetic
LHDHYTQKN

SEQ ID NO: 1868 - protein, 9 aa, Artificial
  Synthetic
LHDHYTQKK

SEQ ID NO: 1869 - protein, 9 aa, Artificial
  Synthetic
LHEHYSQKS

SEQ ID NO: 1870 - protein, 9 aa, Artificial
  Synthetic
LHEHYTEKS

SEQ ID NO: 1871 - protein, 9 aa, Artificial
  Synthetic
LHEHYTKKS

SEQ ID NO: 1872 - protein, 9 aa, Artificial
  Synthetic
LHEHYTQKT

SEQ ID NO: 1873 - protein, 9 aa, Artificial
  Synthetic
LHEHYTQKA

SEQ ID NO: 1874 - protein, 9 aa, Artificial
  Synthetic
LHEHYTQKG

SEQ ID NO: 1875 - protein, 9 aa, Artificial
  Synthetic
LHEHYTQKN

SEQ ID NO: 1876 - protein, 9 aa, Artificial
  Synthetic
LHEHYTQKK

SEQ ID NO: 1877 - protein, 9 aa, Artificial
  Synthetic
LHQHYTQKT

SEQ ID NO: 1878 - protein, 9 aa, Artificial
  Synthetic
LHQHYTQKN

SEQ ID NO: 1879 - protein, 9 aa, Artificial
  Synthetic
LHHHYTDKS

SEQ ID NO: 1880 - protein, 9 aa, Artificial
  Synthetic
LHHHYTQKN

SEQ ID NO: 1881 - protein, 9 aa, Artificial
  Synthetic
LHKHYTQKT

SEQ ID NO: 1882 - protein, 9 aa, Artificial
  Synthetic
LHKHYTQKN

SEQ ID NO: 1883 - protein, 9 aa, Artificial
  Synthetic
LHNNYTQKT

SEQ ID NO: 1884 - protein, 9 aa, Artificial
  Synthetic
LHNNYTQKN

SEQ ID NO: 1885 - protein, 9 aa, Artificial
  Synthetic
LHNYYSQKS

SEQ ID NO: 1886 - protein, 9 aa, Artificial
  Synthetic
LHNYYTEKS

SEQ ID NO: 1887 - protein, 9 aa, Artificial
  Synthetic
LHNYYTKKS

SEQ ID NO: 1888 - protein, 9 aa, Artificial
  Synthetic
LHNYYTQKT

SEQ ID NO: 1889 - protein, 9 aa, Artificial
  Synthetic
LHNYYTQKG

SEQ ID NO: 1890 - protein, 9 aa, Artificial
  Synthetic
LHNYYTQKN

SEQ ID NO: 1891 - protein, 9 aa, Artificial
  Synthetic
LHNYYTQKK

SEQ ID NO: 1892 - protein, 9 aa, Artificial
  Synthetic
LHNHYSSKS

SEQ ID NO: 1893 - protein, 9 aa, Artificial
  Synthetic
LHNHYSDKS

SEQ ID NO: 1894 - protein, 9 aa, Artificial
  Synthetic
LHNHYSEKS

SEQ ID NO: 1895 - protein, 9 aa, Artificial
  Synthetic
LHNHYSQKT

SEQ ID NO: 1896 - protein, 9 aa, Artificial
  Synthetic
LHNHYSQKG

SEQ ID NO: 1897 - protein, 9 aa, Artificial
  Synthetic
LHNHYSQKN

SEQ ID NO: 1898 - protein, 9 aa, Artificial
  Synthetic
LHNHYASKS

SEQ ID NO: 1899 - protein, 9 aa, Artificial
  Synthetic
LHNHYANKS

SEQ ID NO: 1900 - protein, 9 aa, Artificial
  Synthetic
LHNHYADKS

SEQ ID NO: 1901 - protein, 9 aa, Artificial
  Synthetic
LHNHYAEKS

SEQ ID NO: 1902 - protein, 9 aa, Artificial
  Synthetic
LHNHYAKKS

SEQ ID NO: 1903 - protein, 9 aa, Artificial
  Synthetic
LHNHYAQKT

SEQ ID NO: 1904 - protein, 9 aa, Artificial
  Synthetic
LHNHYAQKA

SEQ ID NO: 1905 - protein, 9 aa, Artificial
  Synthetic
LHNHYAQKG

SEQ ID NO: 1906 - protein, 9 aa, Artificial
  Synthetic
LHNHYAQKN

SEQ ID NO: 1907 - protein, 9 aa, Artificial
  Synthetic
LHNHYAQKK

SEQ ID NO: 1908 - protein, 9 aa, Artificial
  Synthetic
LHNHYNDKS

SEQ ID NO: 1909 - protein, 9 aa, Artificial
  Synthetic
LHNHYNQKT

SEQ ID NO: 1910 - protein, 9 aa, Artificial
  Synthetic
LHNHYNQKN

SEQ ID NO: 1911 - protein, 9 aa, Artificial
  Synthetic
LHNHYVDKS

SEQ ID NO: 1912 - protein, 9 aa, Artificial
  Synthetic
LHNHYVQKT

SEQ ID NO: 1913 - protein, 9 aa, Artificial
  Synthetic
LHNHYVQKG

SEQ ID NO: 1914 - protein, 9 aa, Artificial
  Synthetic
LHNHYVQKN

SEQ ID NO: 1915 - protein, 9 aa, Artificial
  Synthetic
LHNHYTSKT

SEQ ID NO: 1916 - protein, 9 aa, Artificial
  Synthetic
LHNHYTSKG

SEQ ID NO: 1917 - protein, 9 aa, Artificial
  Synthetic
LHNHYTSKN

SEQ ID NO: 1918 - protein, 9 aa, Artificial
  Synthetic
LHNHYTSKK

SEQ ID NO: 1919 - protein, 9 aa, Artificial
  Synthetic
LHNHYTNKT

SEQ ID NO: 1920 - protein, 9 aa, Artificial
  Synthetic
LHNHYTNKN

SEQ ID NO: 1921 - protein, 9 aa, Artificial
  Synthetic
LHNHYTDKT

SEQ ID NO: 1922 - protein, 9 aa, Artificial
  Synthetic
LHNHYTDKA

SEQ ID NO: 1923 - protein, 9 aa, Artificial
  Synthetic
LHNHYTDKG

SEQ ID NO: 1924 - protein, 9 aa, Artificial
  Synthetic
LHNHYTDKN

SEQ ID NO: 1925 - protein, 9 aa, Artificial
  Synthetic
LHNHYTDKQ

SEQ ID NO: 1926 - protein, 9 aa, Artificial
  Synthetic
LHNHYTDKK

SEQ ID NO: 1927 - protein, 9 aa, Artificial
  Synthetic
LHNHYTEKT

SEQ ID NO: 1928 - protein, 9 aa, Artificial
  Synthetic
LHNHYTEKA

SEQ ID NO: 1929 - protein, 9 aa, Artificial
  Synthetic
LHNHYTEKG

SEQ ID NO: 1930 - protein, 9 aa, Artificial
  Synthetic
LHNHYTEKN

SEQ ID NO: 1931 - protein, 9 aa, Artificial
  Synthetic
LHNHYTEKK

SEQ ID NO: 1932 - protein, 9 aa, Artificial
  Synthetic
LHNHYTHKT

SEQ ID NO: 1933 - protein, 9 aa, Artificial
  Synthetic
LHNHYTHKN

SEQ ID NO: 1934 - protein, 9 aa, Artificial
  Synthetic
LHNHYTKKT

SEQ ID NO: 1935 - protein, 9 aa, Artificial
  Synthetic
LHNHYTKKG

SEQ ID NO: 1936 - protein, 9 aa, Artificial
  Synthetic
LHNHYTKKN

SEQ ID NO: 1937 - protein, 9 aa, Artificial
  Synthetic
LHNHYTMKN

SEQ ID NO: 1938 - protein, 5 aa, Artificial
  Synthetic
GGGGS

SEQ ID NO: 1939 - protein, 46 aa, Artificial
  Synthetic
RCPEPKSCDTPPPCPRCPEPKSCDTPPPCPRCPEPKSCDTPPPCPR

We claim:

1. A non-naturally occurring protein comprising a variant Fc region having the formula:
-X(118)-X(119)-X(120)-X(121)-X(122)-X(123)-X(124)-X(125)-X(126)-X(127)-X(128)-X(129)-X(130)-X(131)-X(132)-X(133)-X(134)-X(135)-X(136)-X(137)-X(138)-X(139)-X(140)-X(141)-X(142)-X(143)-X(144)-X(145)-X(146)-X(147)-X(148)-X(149)-X(150)-X(151)-X(152)-X(153)-X(154)-X(155)-X(156)-X(157)-X(158)-X(159)-X(160)-X(161)-X(162)-X(163)-X(164)-X(165)-X(166)-X(167)-X(168)-X(169)-X(170)-X(171)-X(172)-X(173)-X(174)-X(175)-X(176)-X(177)-X(178)-X(179)-X(180)-X(181)-X(182)-X(183)-X(184)-X(185)-X(186)-X(187)-X(188)-X(189)-X(190)-X(191)-X(192)-X(193)-X(194)-X(195)-X(196)-X(197)-X(198)-X(199)-X(200)-X(201)-X(202)-X(203)-X(204)-X(205)-X(206)-X(207)-X(208)-X(209)-X(210)-X(211)-X(212)-X(213)-X(214)-X(215)-X(216)-X(217)-X(218)-X(219)-X(220)-X(221)-X(222)-X(223)-X(224)-X(225)-X(226)-X(227)-X(228)-X(229)-X(230)-X(231)-X(232)-X(233)-X(234)-X(235)-X(236)-X(237)-X(238)-X(239)-X(240)-X(241)-X(242)-X(243)-X(244)-X(245)-X(246)-X(247)-X(248)-X(249)-X(250)-X(251)-X(252)-X(253)-X(254)-X(255)-X(256)-X(257)-X(258)-X(259)-X(260)-X(261)-X(262)-X(263)-X(264)-X(265)-X(266)-X(267)-X(268)-X(269)-X(270)-X(271)-X(272)-X(273)-X(274)-X(275)-X(276)-X(277)-X(278)-X(279)-X(280)-X(281)-X(282)-X(283)-X(284)-X(285)-X(286)-X(287)-X(288)-X(289)-X(290)-X(291)-X(292)-X(293)-X(294)-X(295)-X(296)-X(297)-X(298)-X(299)-X(300)-X(301)-X(302)-X(303)-X(304)-X(305)-X(306)-X(307)-X(308)-X(309)-X(310)-X(311)-X(312)-X(313)-X(314)-X(315)-X(316)-X(317)-X(318)-X(319)-X(320)-X(321)-X(322)-X(323)-X(324)-X(325)-X(326)-X(327)-X(328)-X(329)-X(330)-X(331)-X(332)-X(333)-X(334)-X(335)-X(336)-X(337)-X(338)-X(339)-X(340)-X(341)-X(342)-X(343)-X(344)-X(345)-X(346)-X(347)-X(348)-X(349)-X(350)-X(351)-X(352)-X(353)-X(354)-X(355)-X(356)-X(357)-X(358)-X(359)-X(360)-X(361)-X(362)-X(363)-X(364)-X(365)-X(366)-X(367)-X(368)-X(369)-X(370)-X(371)-X(372)-X(373)-X(374)-X(375)-X(376)-X(377j-X(378)-X(379)-X(380)-X(381)-X(382)-X(383)-X(384)-X(385)-X(386)-X(387)-X(388)-X(389)-X(390)-X(391)-X(392)-X(393)-X(394)-X(395)-X(396)-X(397)-X(398)-X(399)-X(400)-X(401)-X(402)-X(403)-X(404)-X(405)-X(406)-X(407)-X(408)-X(409)-X(410)-X(411)-X(412)-X(413)-X(414)-X(415)-X(416)-X(417)-X(418)-X(419)-X(420)-X(421)-X(422)-X(423)-X(424)-X(425)-X(426)-X(427)-X(428)-X(429)-X(430)-X(431)-X(432)-X(433)-X(434)-X(435)-X(436)-X(437)-X(438)-X(439)-X(440)-X(441)-X(442)-X(443)-X(444)-X(445)-X(446)-X(447)-;
wherein
X(118) is A;
X(119) is S;
X(120) is T;
X(121) is K;
X(122) is G;
X(123) is P;
X(124) is S;
X(125) is V;
X(126) is F;
X(127) is P;
X(128) is L;
X(129) is A;
X(130) is P;
X(131) is S;
X(132) is S;
X(133) is K;
X(134) is S;
X(135) is T;
X(136) is S;
X(137) is G;
X(138) is G;
X(139) is T;
X(140) is A;
X(141) is A;
X(142) is L;
X(143) is G;
X(144) is C;
X(145) is L;
X(146) is V;
X(147) is K;
X(148) is D;
X(149) is Y;
X(150) is F;
X(151) is P;
X(152) is E;
X(153) is P;
X(154) is V;
X(155) is T;
X(156) is V;
X(157) is S;
X(158) is W;
X(159) is N;
X(160) is S;
X(161) is G;
X(162) is A;
X(163) is L;
X(164) is T;
X(165) is S;
X(166) is G;
X(167) is V;
X(168) is H;
X(169) is T;
X(170) is F;
X(171) is P;
X(172) is A;
X(173) is V;
X(174) is L;
X(175) is Q;
X(176) is S;
X(177) is S;
X(178) is G;
X(179) is L;
X(180) is Y;
X(181) is S;
X(182) is L;
X(183) is S;
X(184) is S;
X(185) is V;
X(186) is V;
X(187) is T;
X(188) is V;
X(189) is P;
X(190) is S;
X(191) is S;
X(192) is S;
X(193) is L;
X(194) is G;
X(195) is T;
X(196) is Q;
X(197) is T;
X(198) is Y;
X(199) is I;
X(200) is C;
X(201) is N;
X(202) is V;
X(203) is N;
X(204) is H;
X(205) is K;
X(206) is P;
X(207) is S;
X(208) is N;
X(209) is T;
X(210) is K;
X(211) is V;
X(212) is D;
X(213) is K;
X(214) is K;
X(215) is V;
X(216) is E;
X(217) is P;
X(218) is K;
X(219) is S;
X(220) is C;
X(221) is D;
X(222) is K;
X(223) is T;
X(224) is H;
X(225) is T;
X(226) is C;
X(227) is P;
X(228) is P;
X(229) is C;
X(230) is P;
X(231) is A;
X(232) is P;
X(233) is E;
X(234) is L;
X(235) is L;
X(236) is G;
X(237) is G;
X(238) is P;
X(239) is S;
X(240) is V;
X(241) is F;
X(242) is L;
X(243) is F;
X(244) is P;
X(245) is P;
X(246) is K;
X(247) is P;
X(248) is K;
X(249) is D;
X(250) is T;
X(251) is selected from the group consisting of L, D, E, H, and T;
X(252) is selected from the group consisting of M, D, E, and H;
X(253) is selected from the group consisting of I, D, E, F, H, K, L, N, P, Q, R, S, T, V, W, and Y;
X(254) is selected from the group consisting of S, E, K, N, P, Q, R, V, and W;
X(255) is R;
X(256) is selected from the group consisting of T, I, L, M, P, S, V, W, and Y;
X(257) is P;
X(258) is E;
X(259) is selected from the group consisting of V and T;
X(260) is T;
X(261) is C;
X(262) is V;
X(263) is V;
X(264) is V;
X(265) is D;
X(266) is V;
X(267) is S;
X(268) is H;
X(269) is E;
X(270) is D;
X(271) is P;
X(272) is E;
X(273) is V;
X(274) is K;
X(275) is F;
X(276) is N;
X(277) is W;
X(278) is selected from the group consisting of Y, D and E;
X(279) is selected from the group consisting of V, A, Q, and T;
X(280) is D;
X(281) is G;
X(282) is selected from the group consisting of V, F, I, L, P, Q, W, and Y;
X(283) is E;
X(284) is V;
X(285) is selected from the group consisting of H, E, P, and T;
X(286) is N;
X(287) is A;
X(288) is K;
X(289) is T;
X(290) is K;
X(291) is P;
X(292) is R;
X(293) is E;
X(294) is E;
X(295) is Q;
X(296) is Y;
X(297) is N;
X(298) is S;
X(299) is T;
X(300) is Y,
X(301) is selected from the group consisting of R, G, K, and Q;
X(302) is selected from the group consisting of D, E, H, K, Q, S, and T;
X(303) is selected from the group consisting of V, N, P, Q, R, and S;
X(304) is S;
X(305) is selected from the group consisting of V, G, P, and T;
X(306) is selected from the group consisting of L, F, H, I, N, T, V, and Y;
X(307) is T;
X(308) is selected from the group consisting of V, A, N, P, and S;
X(309) is selected from the group consisting of L, F, G, I, M, N, Q, S, T, V, W, and Y;
X(310) is H;
X(311) is selected from the group consisting of Q, D, E, G, P, T, and W;
X(312) is D;
X(313) is W;
X(314) is L;
X(315) is N;
X(316) is G;
X(317) is K;
X(318) is E;
X(319) is Y;
X(320) is K;
X(321) is C;
X(322) is K;
X(323) is V;
X(324) is S;
X(325) is N;
X(326) is K;
X(327) is A;
X(328) is L;
X(329) is P;
X(330) is A;
X(331) is P;
X(332) is l;
X(333) is E;
X(334) is K;
X(335) is T;
X(336) is I;
X(337) is S;
X(338) is K;
X(339) is A;
X(340) is K;
X(341) is G;
X(342) is Q;
X(343) is P;
X(344) is R;
X(345) is E;
X(346) is P;
X(347) is Q;
X(348) is V;
X(349) is Y;
X(350) is T;
X(351) is L;
X(352) is P;
X(353) is P;
X(354) is S;
X(355) is R;
X(356) is D;
X(357) is E;
X(358) is L;
X(359) is T;
X(360) is K;
X(361) is N;
X(362) is Q;
X(363) is V;
X(364) is S;
X(365) is L;
X(366) is T;
X(367) is C;
X(368) is L;
X(369) is V;
X(370) is K;
X(371) is G;
X(372) is F;
X(373) is Y;
X(374) is P;
X(375) is S;
X(376) is D;
X(377) is I;
X(378) is A;
X(379) is V;
X(380) is E;
X(381) is W;
X(382) is E;
X(383) is S;
X(384) is N;
X(385) is G;
X(386) is Q;
X(387) is P;
X(388) is E;
X(389) is N;
X(390) is N;
X(391) is Y;
X(392) is K;
X(393) is T;
X(394) is T;
X(395) is P;
X(396) is P;
X(397) is V;
X(398) is L;
X(399) is D;
X(400) is S;
X(401) is D;
X(402) is G;
X(403) is S;
X(404) is selected from the group consisting of F, H, I, L, M, N, Q, T, and V;
X(405) is selected from the group consisting of F and W;
X(406) is selected from the group consisting of L, A, D, E, G, K, N, Q, S, T, and V;
X(407) is selected from the group consisting of Y and H;
X(408) is S;
X(409) is K;
X(410) is selected from the group consisting of L, I and Q;
X(411) is T;
X(412) is selected from the group consisting of V and P;
X(413) is D;
X(414) is K;
X(415) is S;
X(416) is R;
X(417) is W;
X(418) is Q;
X(419) is Q;
X(420) is G;
X(421) is N;
X(422) is V;
X(423) is F;
X(424) is S;
X(425) is C;
X(426) is S;
X(427) is V;
X(428) is M;
X(429) is H;
X(430) is E;
X(431) is A;
X(432) is selected from the group consisting of L, E and K;
X(433) is selected from the group consisting of H, D, G, P, S, T, and W;
X(434) is selected from the group consisting of N, D, E, G, H, S, T, and W;
X(435) is selected from the group consisting of H, G, K, M, N, P, S, T, and V;
X(436) is Y;
X(437) is selected from the group consisting of T, D, E, G, H, K, N, Q, and S;
X(438) is selected from the group consisting of Q, G, P, S, and T; and,
X(439) is K;
X(440) is selected from the group consisting of S, D, E, G, H, K, N, P, Q, R, and T,
X(441) is L;
X(442) is S;
X(443) is L;
X(444) is S;
X(445) is P;
X(446) is G;
X(447) is K;
said non-naturally occurring protein having reduced immunogenicity as compared with a protein comprising SEQ ID NO:1.

2. A non-naturally occurring protein comprising a variant Fc region comprising at least one amino acid modification of SEQ ID NO:1, said modification at a position selected from the group consisting of positions 251, 252, 253, 254, 256, 259, 278, 279, 282, 285, 301, 302, 303, 305, 306, 308, 309, 311, 404, 405, 406, 407, 410, 412, 432, 433, 434, 435, 437, 438, and 440, wherein said modification at position 251 is selected from the group consisting of D, E, H, and T; wherein said modification at position 252 is selected from the group consisting of D, E, and H; wherein said modification at position 253 is selected from the group consisting of D, E, F, H, K, L, N, P, Q, R, S, T, V, W, and Y; wherein said modification at position 254 is selected from the group consisting of E, K, N, P, Q, R, V, and W; wherein said modification at position 256 is selected from the group consisting of I, L, M, P, S, V, W, and Y; wherein the modification at position 259 is T; wherein said modification at position 278 is selected from the group consisting of D and E; wherein said modification at position 279 is selected from the group consisting of A, Q, and T; wherein said modification at position 282 is selected from the group consisting of F, I, L, P, Q, W, and Y; wherein said modification at position 285 is selected from the group consisting of P and T; wherein said modification at position 301 is selected from the group consisting of G, K, and Q; wherein said modification at position 302 is selected from the group consisting of A, D, E, H, K, Q, S, and T; wherein said modification at position 303 is selected from the group consisting of N, P, Q, R, and S; wherein said modification at position 305 is selected from the group consisting of G, P, and T; wherein said modification at position 306 is selected from the group consisting of F, H, I, N, T, V, and Y; wherein said modification at position 308 is selected from the group consisting of A, N, P, and S; wherein said modification at position 309 is selected from the group consisting of F, G, I, M, N, Q, S, T, V, W, and Y; wherein said modification at position 311 is selected from the group consisting of D, E, G, P, T, and W; wherein said modification at position 404 is selected from the group consisting of H, I, L, M, N, Q, T, and V; wherein the modification at position 405 is W; wherein said modification at position 406 is selected from the group consisting of A, D, E, G, K, N, Q, S, T, and V; wherein the modification at position 407 is H; wherein said modification at position 410 is selected from the group consisting of I and Q; wherein the modification at position 412 is P; wherein said modification at position 432 is selected from the group consisting of E and K; wherein said modification at position 433 is selected from the group consisting of D, G, P, S, T, and W; wherein said modification at position 434 is selected from the group consisting of D, E, G, H, S, T, and W; wherein said modification at position 435 is selected from the group consisting of G, K, M, N, P, S, T, and V; wherein said modification at position 437 is selected from the group consisting of D, E, G, H, K, N, Q, and S; wherein said modification at position 438 is selected from the group consisting of G, P, S, and T; and, wherein said modification at position 440 is selected from the group consisting of D, E, G, H, K, N, P, Q, R, and T, said non-naturally occurring protein having reduced immunogenicity as compared with a protein comprising SEQ ID NO:1.

3. A variant protein of claim 2, wherein said modification at position 251 is selected from the group consisting of D, E, H, and T; wherein the modification at position 252 is D; wherein said modification at position 253 is selected from the group consisting of D and E; wherein said modification at position 256 is selected from the group consisting of M, W, and Y; wherein the modification at position 278 is D; wherein said modification at position 282 is selected from the group consisting of F, L, Q, W, and Y; wherein said modification at position 303 is selected from the group consisting of N, P, Q, R, and S; wherein the modification at position 311 is D; wherein said modification at position 404 is selected from the group consisting of H, N, Q, and T; wherein said modification at position 432 is selected from the group consisting of E and K; and, wherein the modification at position 437 is E.

4. A variant protein of claim 2 wherein at least one modification is made to an amino acid in the group consisting of Agretope 16 (251-259), Agretope 17a (262-270), Agretope 18 (277-285), Agretope 19a (300-308), Agretope 20a (302-310), Agretope 21a (303-311), Agretope 23 (369-377), Agretope 24a (404-412), Agretope 25a (406-414), Agretope 27a (422-430), and Agretope 28a (432-440).

5. A non-naturally occurring protein comprising a variant Fc region having the formula:
-X(118)-X(119)-X(120)-X(121)-X(122)-X(123)-X(124)-X(125)-X(126)-X(127)-X(128)-X(129)-X(130)-X(131)-X(132)-X(133)-X(134)-X(135)-X(136)-X(137)-X(138)-X(139)-X(140)-X(141)-X(142)-X(143)-X(144)-X(145)-X(146)-X(147)-X(148)-X(149)-X(150)-X(l151)-X(152)-X(153)-X(154)-X(155)-X(156)-X(157)-X(158)-X(159)-X(160)-X(161)-X(162)-X(163)-X(164)-X(165)-X(166)-X(167)-X(168)-X(169)-X(170)-X(171)-X(172)-X(173)-X(174)-X(175)-X(176)-X(177)-X(178)-X(179)-X(180)-X(181)-X(182)-X(183)-X(184)-X(185)-X(186)-X(187)-X(188)-X(189)-X(190)-X(191)-X(192)-X(193)-X(194)-X(195)-X(196)-X(197)-X(198)-X(199)-X(200)-X(201)-X(202)-X(203)-X(204)-X(205)-X(206)-X(207)-X(208)-X(209)-X(210)-X(211)-X(212)-X(213)-X(214)-X(215)-X(216)-X(217)-X(218)-X(219)-X(220)-X(221)-X(222)-X(223)-X(224)-X(225)-X(226)-X(227)-X(228)-X(229)-X(230)-X(231)-X(232)-X(233)-X(234)-X(235)-X(236)-X(237)-X(238)-X(239)-X(240)-X(241)-X(242)-X(243)-X(244)-X(245)-X(246)-X(247)-X(248)-X(249)-X(250)-X(251)-X(252)-X(253)-X(254)-X(255)-X(256)-X(257)-X(258)-X(259)-X(260)-X(261)-X(262)-X(263)-X(264)-X(265)-X(266)-X(267)-X(268)-X(269)-X(270)-X(271)-X(272)-X(273)-X(274)-X(275)-X(276)-X(277)-X(278)-X(279)-X(280)-X(281)-X(282)-X(283)-X(284)-X(285)-X(286)-X(287)-X(288)-X(289)-X(290)-X(291)-X(292)-X(293)-X(294)-X(295)-X(296)-X(297)-X(298)-X(299)-X(300)-X(301)-X(302)-X(303)-X(304)-X(305)-X(306)-X(307)-X(308)-X(309)-X(310)-X(311)-X(312)-X(313)-X(314)-X(315)-X(316)-X(317)-X(318)-X(319)-X(320)-X(321)-X(322)-X(323)-X(324)-X(325)-X(326)-X(327)-X(328)-X(329)-X(330)-X(331)-X(332)-X(333)-X(334)-X(335)-X(336)-X(337)-X(338)-X(339)-X(340)-X(341)-X(342)-X(343)-X(344)-X(345)-X(346)-X(347)-X(348)-X(349)-X(350)-X(351)-X(352)-X(353)-X(354)-X(355)-X(356)-X(357)-X(358)-X(359)-X(360)-X(361)-X(362)-X(363)-X(364)-X(365)-X(366)-X(367)-X(368)-X(369)-X(370)-X(371)-X(372)-X(373)-X(374)-X(375)-X(376)-X(377)-X(378)-X(379)-X(380)-X(381)-X(382)-X(383)-X(384)-X(385)-X(386)-X(387)-X(388)-X(389)-X(390)-X(391)-X(392)-X(393)-X(394)-X(395)-X(396)-X(397)-X(398)-X(399)-X(400)-X(401)-X(402)-X(403)-X(404)-X(405)-X(406)-X(407)-X(408)-X(409)-X(410)-X(411)-X(412)-X(413)-X(414)-X(415)-X(416)-X(417)-X(418)-X(419)-X(420)-X(421)-X(422)-X(423)-X(424)-X(425)-X(426)-X(427)-X(428)-X(429)-X(430)-X(431)-X(432)-X(433)-X(434)-X(435)-X(436)-X(437)-X(438)-X(439)-X(440)-X(441)-X(442)-X(443)-X(444)-X(445)-X(446)-X(447)-; wherein
X(118) is A;
X(119) is S;
X(120) is T;
X(121) is K;
X(122) is G;
X(123) is P;
X(124) is S;
X(125) is V;
X(126) is F;
X(127) is P;
X(128) is L;
X(129) is A;
X(130) is P;
X(131) is C;
X(132) is S;
X(133) is R;
X(134) is S;
X(135) is T;
X(136) is S;
X(137) is E;
X(138) is S;
X(139) is T;
X(140) is A;
X(141) is A;
X(142) is L;
X(143) is G;
X(144) is C;
X(145) is L;
X(146) is V;
X(147) is K;
X(148) is D;
X(149) is Y;
X(150) is F;
X(151) is P;
X(152) is E;
X(153) is P;
X(154) is V;
X(155) is T;
X(156) is V;
X(157) is S;
X(158) is W;
X(159) is N;
X(160) is S;
X(161) is G;
X(162) is A;
X(163) is L;
X(164) is T;
X(165) is S;
X(166) is G;
X(167) is V;
X(168) is H;
X(169) is T;
X(170) is F;
X(171) is P;
X(172) is A;
X(173) is V;
X(174) is L;
X(175) is Q;
X(176) is S;
X(177) is S;
X(178) is G;
X(179) is L;
X(180) is Y;
X(181) is S;
X(182) is L;
X(183) is S;
X(184) is S;
X(185) is V;
X(186) is V;
X(187) is T;
X(188) is V;
X(189) is P;
X(190) is S;
X(191) is S;
X(192) is N;
X(193) is F;
X(194) is G;
X(195) is T;
X(196) is Q;
X(197) is T;
X(198) is Y;
X(199) is T;
X(200) is C;
X(201) is N;
X(202) is V;
X(203) is D;
X(204) is H;
X(205) is K;
X(206) is P;
X(207) is S;
X(208) is N;
X(209) is T;
X(210) is K;
X(211) is V;
X(212) is D;
X(213) is K;
X(214) is T;
X(215) is V;
X(216) is E;
X(217) is R;
X(218) is K;
X(219) is C;
X(220) is C;
X(221) is a bond;
X(222) is V;
X(223) is a bond;
X(224) is E;
X(225) is a bond;
X(226) is C;
X(227) is P;
X(228) is P;
X(229) is C;
X(230) is P;
X(231) is A;
X(232) is P;
X(233) is P;
X(234) is V;
X(235) is A;
X(236) is a bond;
X(237) is G;
X(238) is P;
X(239) is S;
X(240) is V;
X(241) is F;
X(242) is L;
X(243) is F;
X(244) is P;
X(245) is P;
X(246) is K;
X(247) is P;
X(248) is K;
X(249) is D;
X(250) is T;
X(251) is selected from the group consisting of L, D, E, H, and T;
X(252) is selected from the group consisting of M, D, E, and H;
X(253) is selected from the group consisting of I, D, E, F, H, K, L, N, P, Q, R, S, T, V, W, and Y;
X(254) is selected from the group consisting of S, E, K, N, P, Q, R, V, and W;
X(255) is R;
X(256) is selected from the group consisting of T, I, L, M, P, S, V, W, and Y;
X(257) is P;
X(258) is E;
X(259) is selected from the group consisting of V and T;
X(260) is T;
X(261) is C;
X(262) is V;
X(263) is V;
X(264) is V;
X(265) is D;
X(266) is V;
X(267) is S;
X(268) is H;
X(269) is E;
X(270) is D;
X(271) is P;
X(272) is E;
X(273) is V;
X(274) is Q;
X(275) is F;
X(276) is N;
X(277) is W;
X(278) is selected from the group consisting of Y, D and E;
X(279) is selected from the group consisting of V, A, Q, and T;
X(280) is D;
X(281) is G;
X(282) is selected from the group consisting of V, F, I, L, Q, and W;
X(283) is E;
X(284) is V;
X(285) is selected from the group consisting of H, P, and T;
X(286) is N;
X(287) is A;
X(288) is K;
X(289) is T;
X(290) is K;
X(291) is P;
X(292) is R;
X(293) is E;
X(294) is E;
X(295) is Q;
X(296) is F;
X(297) is N;
X(298) is S;
X(299) is T;
X(300) is F;
X(301) is selected from the group consisting of R, G, K, and Q;
X(302) is selected from the group consisting of V, A, D, E, H, K, P, Q, S, and T;
X(303) is selected from the group consisting of V, N, P, and Q;
X(304) is S;
X(305) is selected from the group consisting of V, G and P;
X(306) is selected from the group consisting of L, I, N, T, V, and Y;
X(307) is T;
X(308) is V;
X(309) is V;
X(310) is H;
X(311) is Q;
X(312) is D;
X(313) is W;
X(314) is L;
X(315) is N;
X(316) is G;
X(317) is K;
X(318) is E;
X(319) is Y;
X(320) is K;
X(321) is C;
X(322) is K;
X(323) is V;
X(324) is S;
X(325) is N;
X(326) is K;
X(327) is G;
X(328) is L;
X(329) is P;
X(330) is A;
X(331) is P;
X(332) is I;
X(333) is E;
X(334) is K;
X(335) is T;
X(336) is I;
X(337) is S;
X(338) is K;
X(339) is T;
X(340) is K;
X(341) is G;
X(342) is Q;
X(343) is P;
X(344) is R;
X(345) is E;
X(346) is P;
X(347) is Q;
X(348) is V;
X(349) is Y;
X(350) is T;
X(351) is L;
X(352) is P;
X(353) is P;
X(354) is S;
X(355) is R;
X(356) is E;
X(357) is E;
X(358) is M;
X(359) is T;
X(360) is K;
X(361) is N;
X(362) is Q;
X(363) is V;
X(364) is S;
X(365) is L;
X(366) is T;
X(367) is C;
X(368) is L;
X(369) is V;
X(370) is K;
X(371) is G;
X(372) is F;
X(373) is Y;
X(374) is P;
X(375) is S;
X(376) is D;
X(377) is I;
X(378) is A;
X(379) is V;
X(380) is E;
X(381) is W;
X(382) is E;
X(383) is S;
X(384) is N;
X(385) is G;
X(386) is Q;
X(387) is P;
X(388) is E;
X(389) is N;
X(390) is N;
X(391) is Y;
X(392) is K;
X(393) is T;
X(394) is T;
X(395) is P;
X(396) is P;
X(397) is M;
X(398) is L;
X(399) is D;
X(400) is S;
X(401) is D;
X(402) is G;
X(403) is S;
X(404) is selected from the group consisting of F, H, L, M, and N;
X(405) is selected from the group consisting of F, D, E, T, and W;
X(406) is selected from the group consisting of L, A, D, E, G, K, N, Q, S, T, and V;
X(407) is selected from the group consisting of Y and H;
X(408) is S;
X(409) is K;
X(410) is selected from the group consisting of L, I, K, and Q;
X(411) is T;
X(412) is selected from the group consisting of V and P;
X(413) is D;
X(414) is K;
X(415) is S;
X(416) is R;
X(417) is W;
X(418) is Q;
X(419) is Q;
X(420) is G;
X(421) is N;
X(422) is V;
X(423) is F;
X(424) is S;
X(425) is C;
X(426) is S;
X(427) is V;
X(428) is M;
X(429) is H;
X(430) is E;
X(431) is A;
X(432) is selected from the group consisting of L, E and K;
X(433) is selected from the group consisting of H, D, G, P, S, T, and W;
X(434) is selected from the group consisting of N, D, E, G, H, S, T, and W;
X(435) is selected from the group consisting of H, G, K, M, N, P, S, T, and V;
X(436) is Y;
X(437) is selected from the group consisting of T, D, E, G, H, K, N, Q, and S;
X(438) is selected from the group consisting of Q, G, P, S, and T; and
X(439) is K;
X(440) is selected from the group consisting of S, D, E, G, H, K, N, P, Q, R, and T;
X(441) is L;
X(442) is S;
X(443) is L;
X(444) is S;
X(445) is P;
X(446) is G; and
X(447) is K;
said non-naturally occurring protein having reduced immunogenicity as compared with a protein comprising SEQ ID NO:2.

6. A non-naturally occurring protein comprising a variant Fc region comprising at least one amino acid modification of SEQ ID NO:2, said modification at a position selected from the group consisting of positions 251, 252, 253, 254, 256, 259, 278, 279, 282, 285, 301, 302, 303, 305, 306, 404, 405, 406, 407, 410, 412, 432, 433, 434, 435, 437, 438, and 440; and, wherein said modification at position 251 is selected from the group consisting of D, E, H, and T; wherein said modification at position 252 is selected from the group consisting of D, E, and H; wherein said modification at position 253 is selected from the group consisting of D, E, F, H, K, L, N, P, Q, R, S, T, V, W, and Y; wherein said modification at position 254 is selected from the group consisting of E, K, N, P, Q, R, V, and W; wherein said modification at position 256 is selected from the group consisting of I, L, M, P, S, V, W, and Y; wherein the modification at position 259 is T; wherein said modification at position 278 is selected from the group consisting of D and E; wherein said modification at position 279 is selected from the group consisting of A, Q, and T; wherein said modification at position 282 is selected from the group consisting of F, I, L, Q, and W; wherein said modification at position 285 is selected from the group consisting of P and T; wherein said modification at position 301 is selected from the group consisting of G, K, and Q; wherein said modification at position 302 is selected from the group consisting of A, D, E, H, K, P, Q, S, and T; wherein said modification at position 303 is selected from the group consisting of N, P, and Q; wherein said modification at position 305 is selected from the group consisting of G and P; wherein said modification at position 306 is selected from the group consisting of I, N, T, V, and Y; wherein said modification at position 404 is selected from the group consisting of H, L, M, and N; wherein said modification at position 405 is selected from the group consisting of D, E, T, and W; wherein said modification at position 406 is selected from the group consisting of A, D, E, G, K, N, Q, S, T, and V; wherein the modification at position 407 is H; wherein said modification at position 410 is selected from the group consisting of I, K, and Q; wherein the modification at position 412 is P; wherein said modification at position 432 is selected from the group consisting of E and K; wherein said modification at position 433 is selected from the group consisting of D, G, P, S, T, and W; wherein said modification at position 434 is selected from the group consisting of D, E, G, H, S, T, and W; wherein said modification at position 435 is selected from the group consisting of G, K, M, N, P, S, T, and V; wherein said modification at position 437 is selected from the group consisting of D, E, G, H, K, N, Q, and S; wherein said modification at position 438 is selected from the group consisting of G, P, S, and T; and, wherein said modification at position 440 is selected from the group consisting of D, E, G, H, K, N, P, Q, R, and T, said non-naturally occurring protein having reduced immunogenicity as compared with a protein comprising SEQ ID NO:2.

7. A variant protein of claim 6, wherein at least one modification is made to the group consisting of positions 251, 252, 253, 254, 256, 259, 278, 279, 282, 285, 302, 303, 305, 306, 404, 405, 406, 407, 410, 412, 432, 433, 434, 435, 437, 438, and 440; and, wherein said modification at position 251 is selected from the group consisting of D, E, H, and T; wherein the modification at position 252 is D; wherein said modification at position 253 is selected from the group consisting of D and E; wherein said modification at position 256 is selected from the group consisting of M, W, and Y; wherein the modification at position 278 is D; wherein said modification at position 282 is selected from the group consisting of F, L, Q, and W; wherein said modification at position 404 is selected from the group consisting of H and N; wherein said modification at position 432 is selected from the group consisting of E and K; and, wherein the modification at position 437 is E.

8. The variant protein of claim 6, wherein at least one modification is made to the group consisting of Agretope 16 (251-259), Agretope 17a (262-270), Agretope 18 (277-285), Agretope 19b (300-308), Agretope 20b (302-310), Agretope 21b (303-311), Agretope 22a (348-356), Agretope 23 (369-377), Agretope 24a (404-412), Agretope 25a (406-414), Agretope 27a (422-430), and Agretope 28a (432-440).

9. A non-naturally occurring protein comprising a variant Fc region having the formula:
-X(118)-X(119)-X(120)-X(121)-X(122)-X(123)-X(124)-X(125)-X(126)-X(127)-X(128)-X(129)-X(130)-X(131)-X(132)-X(133)-X(134)-X(135)-X(136)-X(137)-X(138)X(139)-X(140)-X(141)-X(142)-X(143)-X(144)-X(145)-X(146)-X(147)-X(148)-X(149)-X(150)-X(151)-X(152)-X(153)-X(154)-X(155)-X(156)-X(157)-X(158)-X(159)-X(160)-X(l161)-X(162)-X(163)-X(164)-X(165)-X(166)-X(167)-X(168)-X(169)-X(170)-X(171)-X(172)-X(173)-X(174)-X(175)-X(176)-X(177)-X(178)-X(179)-X(180)-X(181)-X(182)-X(183)-X(184)-X(185)-X(186)-X(187)-X(188)-X(189)-X(190)-X(191)-X(192)-X(193)-X(194)-X(195)-X(196)-X(197)-X(198)-X(199)-X(200)-X(201)-X(202)-X(203)-X(204)-X(205)-X(206)-X(207)-X(208)-X(209)-X(210)-X(211)-X(212)-X(213)-X(214)-X(215)-X(216)-X(217)-X(218)-X(219)-X(220)-X(221)-X(222)-X(223)-X(224)-X(225)-X(226)-X(227)-X(228)-X(229)-X(230)-X(231)-X(232)-X(233)-X(234)-X(235)-X(236)-X(237)-X(238)-X(239)-X(240)-X(241)-X(242)-X(243)-X(244)-X(245)-X(246)-X(247)-X(248)-X(249)-X(250)-X(251)-X(252)-X(253)-X(254)-X(255)-X(256)-X(257)-X(258)-X(259)-X(260)-X(261)-X(262)-X(263)-X(264)-X(265)-X(266)-X(267)-X(268)-X(269)-X(270)-X(271)-X(272)-X(273)-X(274)-X(275)-X(276)-X(277)-X(278)-X(279)-X(280)-X(281)-X(282)-X(283)-X(284)-X(285)-X(286)-X(287)-X(288)-X(289)-X(290)-X(291)-X(292)-X(293)-X(294)-X(295)-X(296)-X(297)-X(298)-X(299)-X(300)-X(301)-X(302)-X(303)-X(304)-X(305)-X(306)-X(307)-X(308)-X(309)-X(310)-X(311)-X(312)-X(313)-X(314)-X(315)-X(316)-X(317)-X(318)-X(319)-X(320)-X(321)-X(322)-X(323)-X(324)-X(325)-X(326)-X(327)-X(328)-X(329)-X(330)-X(331)-X(332)-X(333)-X(334)-X(335)-X(336)-X(337)-X(338)-X(339)-X(340)-X(341)-X(342)-X(343)-X(344)-X(345)-X(346)-X(347)-X(348)-X(349)-X(350)-X(351)-X(352)-X(353)-X(354)-X(355)-X(356)-X(357)-X(358)-X(359)-X(360)-X(361)-X(362)-X(363)-X(364)-X(365)-X(366)-X(367)-X(368)-X(369)-X(370)-X(371)-X(372)-X(373)-X(374)-X(375)-X(376)-X(377)-X(378)-X(379)-X(380)-X(381)-X(382)-X(383)-X(384)-X(385)-X(386)-X(387)-X(388)-X(389)-X(390)-X(391)-X(392)-X(393)-X(394)-X(395)-X(396)-X(397)-X(398)-X(399)-X(400)-X(401)-X(402)-X(403)-X(404)-X(405)-X(406)-X(407)-X(408)-X(409)-X(410)-X(411)-X(412)-X(413)-X(414)-X(415)-X(416)-X(417)-X(418)-X(419)-X(420)-X(421)-X(422)-X(423)-X(424)-X(425)-X(426)-X(427)-X(428)-X(429)-X(430)-X(431)-X(432)-X(433)-X(434)-X(435)-X(436)-X(437)-X(438)-X(439)-X(440)-X(441)-X(442)-X(443)-X(444)-X(445)-X(446)-X(447)-;
wherein
X(118) is A;
X(119) is S;
X(120) is T;
X(121) is K;
X(122) is G;
X(123) is P;
X(124) is S;
X(125) is V;
X(126) is F;
X(127) is P;
X(128) is L;
X(129) is A;
X(130) is P;
X(131) is C;
X(132) is S;
X(133) is R;
X(134) is S;
X(135) is T;
X(136) is S;
X(137) is G;
X(138) is G;
X(139) is T;
X(140) is A;
X(141) is A;
X(142) is L;
X(143) is G;
X(144) is C;
X(145) is L;
X(146) is V;
X(147) is K;
X(148) is D;
X(149) is Y;
X(150) is F;
X(151) is P;
X(152) is E;
X(153) is P;
X(154) is V;
X(155) is T;
X(156) is V;
X(157) is S;
X(158) is W;
X(159) is N;
X(160) is S;
X(161) is G;
X(162) is A;
X(163) is L;
X(164) is T;
X(165) is S;
X(166) is G;
X(167) is V;
X(168) is H;
X(169) is T;
X(170) is F;
X(171) is P;
X(172) is A;
X(173) is V;
X(174) is L;
X(175) is Q;
X(176) is S;
X(177) is S;
X(178) is G;
X(179) is L;
X(180) is Y;
X(181) is S;
X(182) is L;
X(183) is S;
X(184) is S;
X(185) is V;
X(186) is V;
X(187) is T;
X(188) is V;
X(189) is P;
X(190) is S;
X(191) is S;
X(192) is S;
X(193) is L;
X(194) is G;
X(195) is T;
X(196) is Q;
X(197) is T;
X(198) is Y;
X(199) is T;
X(200) is C;
X(201) is N;
X(202) is V;
X(203) is N;
X(204) is H;
X(205) is K;
X(206) is P;
X(207) is S;
X(208) is N;
X(209) is T;
X(210) is K;
X(211) is V;
X(212) is D;
X(213) is K;
X(214) is R;
X(215) is V;
X(216) is E;
X(217) is L;
X(218) is K;
X(219) is T;
X(220) is P;
X(221) is the sequence LGD;
X(222) is T;
X(223) is T;
X(224) is H;
X(225) is T;
X(226) is C;
X(227) is P;
X(228) is the sequence RCPEPKSCDTPPPCPRCPEPKSCDTPPPCPRCPEPKSCDTPPPCPR; (SEQ ID NO: 1939)
X(229) is C;
X(230) is P;
X(231) is A;
X(232) is P;
X(233) is E;
X(234) is L;
X(235) is L;
X(236) is G;
X(237) is G;
X(238) is P;
X(239) is S;
X(240) is V;
X(241) is F;
X(242) is L;
X(243) is F;
X(244) is P;
X(245) is P;
X(246) is K;
X(247) is P;
X(248) is K;
X(249) is D;
X(250) is T;
X(251) is selected from the group consisting of L, D, E, H, and T;
X(252) is selected from the group consisting of M, D, E, and H;
X(253) is selected from the group consisting of I, D, E, F, H, K, L, N, P, Q, R, S, T, V, W, and Y;
X(254) is selected from the group consisting of S, E, K, N, P, Q, R, V, and W;
X(255) is R;
X(256) is selected from the group consisting of T, I, L, M, P, S, V, W, and Y;
X(257) is P;
X(258) is E;
X(259) is selected from the group consisting of V and T;
X(260) is T;
X(261) is C;
X(262) is V;
X(263) is V;
X(264) is V;
X(265) is D;
X(266) is V;
X(267) is S;
X(268) is H;
X(269) is E;
X(270) is D;
X(271) is P;
X(272) is E;
X(273) is V;
X(274) is Q;
X(275) is F;
X(276) is K;
X(277) is W;
X(278) is selected from the group consisting of Y, D, E, and S;
X(279) is selected from the group consisting of V, A, Q, and T;
X(280) is D;
X(281) is G;
X(282) is selected from the group consisting of V, F, G, I, L, P, Q, W, and Y;
X(283) is selected from the group consisting of E and W;
X(284) is V;
X(285) is selected from the group consisting of H, E, P, and T;
X(286) is N;
X(287) is A;
X(288) is K;
X(289) is T;
X(290) is K;
X(291) is P;
X(292) is R;
X(293) is E;
X(294) is E;
X(295) is Q;
X(296) is Y;
X(297) is N;
X(298) is S;
X(299) is T;
X(300) is selected from the group consisting of F, A, D, E, G, H, K, M, N, P, Q, R, S, T, and V;
X(301) is selected from the group consisting of R, D, E, G, H, K, and Q;
X(302) is selected from the group consisting of V, A, D, E, H, K, P, Q, S, and T;
X(303) is selected from the group consisting of V, D, E, N, P, Q, and S;
X(304) is S;
X(305) is selected from the group consisting of V, G, P, and T;
X(306) is selected from the group consisting of L, F, H, I, N, T, V, and Y;
X(307) is T;
X(308) is selected from the group consisting of V, A, N, P, and S;
X(309) is selected from the group consisting of L, F, G, I, M, N, Q, S, T, V, W, and Y;
X(310) is H;
X(311) is selected from the group consisting of Q, D, E, G, P, T, and W;
X(312) is D;
X(313) is W;
X(314) is L;
X(315) is N;
X(316) is G;
X(317) is K;
X(318) is E;
X(319) is Y;
X(320) is K;
X(321) is C;
X(322) is K;
X(323) is V;
X(324) is S;
X(325) is N;
X(326) is K;
X(327) is A;
X(328) is L;
X(329) is P;
X(330) is A;
X(331) is P;
X(332) is I;
X(333) is E;
X(334) is K;
X(335) is T;
X(336) is I;
X(337) is S;
X(338) is K;
X(339) is T;
X(340) is K;
X(341) is G;
X(342) is Q;
X(343) is P;
X(344) is R;
X(345) is E;
X(346) is P;
X(347) is Q;
X(348) is V;
X(349) is Y;
X(350) is T;
X(351) is L;
X(352) is P;
X(353) is P;
X(354) is S;
X(355) is R;
X(356) is E;
X(357) is E;
X(358) is M;
X(359) is T;
X(360) is K;
X(361) is N;
X(362) is Q;
X(363) is V;
X(364) is S;
X(365) is L;
X(366) is T;
X(367) is C;
X(368) is L;
X(369) is V;
X(370) is K;
X(371) is G;
X(372) is F;
X(373) is Y;
X(374) is P;
X(375) is S;
X(376) is D;
X(377) is I;
X(378) is A;
X(379) is V;
X(380) is E;
X(381) is W;
X(382) is E;
X(383) is S;
X(384) is S;
X(385) is G;
X(386) is Q;
X(387) is P;
X(388) is E;
X(389) is N;
X(390) is N;
X(391) is Y;
X(392) is N;
X(393) is T;
X(394) is T;
X(395) is P;
X(396) is P;
X(397) is M;
X(398) is L;
X(399) is D;
X(400) is S;
X(401) is D;
X(402) is G;
X(403) is S;
X(404) is F;
X(405) is F;
X(406) is L;
X(407) is Y;
X(408) is S;
X(409) is K;
X(410) is L;
X(411) is T;
X(412) is V;
X(413) is D;
X(414) is K;
X(415) is S;
X(416) is R;
X(417) is W;
X(418) is Q;
X(419) is Q;
X(420) is G;
X(421) is N;
X(422) is I;
X(423) is F;
X(424) is S;
X(425) is C;
X(426) is S;
X(427) is V;
X(428) is M;
X(429) is H;
X(430) is E;
X(431) is A;
X(432) is L;
X(433) is H;
X(434) is N;
X(435) is R;
X(436) is F;
X(437) is T;
X(438) is Q;
X(439) is K;
X(440) is S;
X(441) is L;
X(442) is S;
X(443) is L;
X(444) is S;
X(445) is P;
X(446) is G; and
X(447) is K; wherein
said non-naturally occurring protein having reduced immunogenicity as compared with a protein comprising SEQ ID NO:3.

10. A non-naturally occurring protein comprising a variant Fc region comprising at least one amino acid modification of a naturally occurring protein sequence selected from the group consisting of SEQ ID NO:3, said modification at a position selected from the group consisting of positions 251, 252, 253, 254, 256, 259, 278, 279, 282, 283, 285, 300, 301, 302, 303, 305, 306, 308, 309, and 311; and, wherein said modification at position 251 is selected from the group consisting of D, E, H, and T; wherein said modification at position 252 is selected from the group consisting of D, E, and H; wherein said modification at position 253 is selected from the group consisting of D, E, F, H, K, L, N, P, Q, R, S, T, V, W, and Y; wherein said modification at position 254 is selected from the group consisting of E, K, N, P, Q, R, V, and W; wherein said modification at position 256 is selected from the group consisting of I, L, M, P, S, V, W, and Y; wherein the modification at position 259 is T; wherein said modification at position 278 is selected from the group consisting of D, E, and S; wherein said modification at position 279 is selected from the group consisting of A, Q, and T; wherein said modification at position 282 is selected from the group consisting of F, G, I, L, P, Q, W, and Y; wherein the modification at position 283 is W; wherein said modification at position 285 is selected from the group consisting of E, P, and T; wherein said modification at position 300 is selected from the group consisting of A, D, E, G, H, K, M, N, P, Q, R, S, T, and V; wherein said modification at position 301 is selected from the group consisting of D, E, G, H, K, and Q; wherein said modification at position 302 is selected from the group consisting of A, D, E, H, K, P, Q, S, and T; wherein said modification at position 303 is selected from the group consisting of D, E, N, P, Q, and S; wherein said modification at position 305 is selected from the group consisting of G, P, and T; wherein said modification at position 306 is selected from the group consisting of F, H, I, N, T, V, and Y; wherein said modification at position 308 is selected from the group consisting of A, N, P, and S; wherein said modification at position 309 is selected from the group consisting of F, G, I, M, N, Q, S, T, V, W, and Y; and, wherein said modification at position 311 is selected from the group consisting of D, E, G, P, T, and W, said non-naturally occurring protein having reduced immunogenicity as compared with a protein comprising SEQ ID NO:3.

11. The non-naturally occurring protein of claim 10, wherein at least one modification is made to the group consisting of positions 251, 252, 253, 254, 256, 259, 278, 279, 282, 283, 285, 302, 303, 305, 306, 308, 309, and 311; and, wherein said modification at position 251 is selected from the group consisting of D, E, H, and T; wherein the modification at position 252 is D; wherein said modification at position 253 is selected from the group consisting of D and E; wherein said modification at position 256 is selected from the group consisting of M, W, and Y; wherein the modification at position 278 is D; wherein said modification at position 282 is selected from the group consisting of F, L, Q, and W; wherein said modification at position 303 is selected from the group consisting of N, P, Q, and S; and, wherein the modification at position 311 is D.

12. The non-naturally occurring protein of claim 10, wherein at least one modification is made to the group consisting of Agretope 4 (145-153), Agretope 5 (149-157), Agretope 6 (167-175), Agretope 7 (174-182), Agretope 8 (179-187), Agretope 9 (180-188), Agretope 10 (182-190), Agretope 11a (185-193), Agretope 12 (202-210), Agretope 13 (215-223), Agretope 15 (240-248), Agretope 16 (251-259), Agretope 17a (262-270), Agretope 18 (277-285), Agretope 19b (300-308), Agretope 20a (302-310), Agretope 21a (303-311), Agretope 22a (348-356), Agretope 23 (369-377), Agretope 27b (422-430), and Agretope 28b (432-440).

13. A non-naturally occurring protein comprising a variant Fc region having the formula:
-X(118)-X(119)-X(120)-X(121)-X(122)-X(123)-X(124)-X(125)-X(126)-X(127)-X(128)-X(129)-X(130)-X(131)-X(132)-X(133)-X(134)-X(135)-X(136)-X(137)-X(138)-X(139)-X(140)-X(141)-X(142)-X(143)-X(144)-X(145)-X(146)-X(147)-X(148)-X(149)-X(150)-X(151)-X(152)-X(153)-X(154)-X(155)-X(156)-X(157)-X(158)-X(159)-X(160)-X(161)-X(162)-X(163)-X(164)-X(165)-X(166)-X(167)-X(168)-X(169)-X(170)-X(171)-X(172)-X(173)-X(174)-X(175)-X(176)-X(177)-X(178)-X(179)-X(180)-X(181)-X(182)-X(183)-X(184)-X(185)-X(186)-X(187)-X(188)-X(189)-X(190)-X(191)-X(192)-X(193)-X(194)-X(195)-X(196)-X(197)-X(198)-X(199)-X(200)-X(201)-X(202)-X(203)-X(204)-X(205)-X(206)-X(207)-X(208)-X(209)-X(210)-X(211)-X(212)-X(213)-X(214)-X(215)-X(216)-X(217)-X(218)-X(219)-X(220)-X(221)-X(222)-X(223)-X(224)-X(225)-X(226)-X(227)-X(228)-X(229)-X(230)-X(231)-X(232)-X(233)-X(234)-X(235)-X(236)-X(237)-X(238)-X(239)-X(240)-X(241)-X(242)-X(243)-X(244)-X(245)-X(246)-X(247)-X(248)-X(249)-X(250)-X(251)-X(252)-X(253)-X(254)-X(255)-X(256)-X(257)-X(258)-X(259)-X(260)-X(261)-X(262)-X(263)-X(264)-X(265)-X(266)-X(267)-X(268)-X(269)-X(270)-X(271)-X(272)-X(273)-X(274)-X(275)-X(276)-X(277)-X(278)-X(279)-X(280)-X(281)-X(282)-X(283)-X(284)-X(285)-X(286)-X(287)-X(288)-X(289)-X(290)-X(291)-X(292)-X(293)-X(294)-X(295)-X(296)-X(297)-X(298)-X(299)-X(300)-X(301)-X(302)-X(303)-X(304)-X(305)-X(306)-X(307)-X(308)-X(309)-X(310)-X(311)-X(312)-X(313)-X(314)-X(315)-X(316)-X(317)-X(318)-X(319)-X(320)-X(321)-X(322)-X(323)-X(324)-X(325)-X(326)-X(327)-X(328)-X(329)-X(330)-X(331)-X(332)-X(333)-X(334)-X(335)-X(336)-X(337)-X(338)-X(339)-X(340)-X(341)-X(342)-X(343)-X(344)-X(345)-X(346)-X(347)-X(348)-X(349)-X(350)-X(351)-X(352)-X(353)-X(354)-X(355)-X(356)-X(357)-X(358)-X(359)-X(360)-X(361)-X(362)-X(363)-X(364)-X(365)-X(366)-X(367)-X(368)-X(369)-X(370)-X(371)-X(372)-X(373)-X(374)-X(375)-X(376)-X(377)-X(378)-X(379)-X(380)-X(381)-X(382)-X(383)-X(384)-X(385)-X(386)-X(387)-X(388)-X(389)-X(390)-X(391)-X(392)-X(393)-X(394)-X(395)-X(396)-X(397)-X(398)-X(399)-X(400)-X(401)-X(402)-X(403)-X(404)-X(405)-X(406)-X(407)-X(408)-X(409)-X(410)-X(411)-X(412)-X(413)-X(414)-X(415)-X(416)-X(417)-X(418)-X(419)-X(420)-X(421)-X(422)-X(423)-X(424)-X(425)-X(426)-X(427)-X(428)-X(429)-X(430)-X(431)-X(432)-X(433)-X(434)-X(435)-X(436)-X(437)-X(438)-X(439)-X(440)-X(441)-X(442)-X(443)-X(444)-X(445)-X(446)-X(447)-;
wherein
X(118) is A;
X(119) is S;
X(120) is T;
X(121) is K;
X(122) is G;
X(123) is P;
X(124) is S;
X(125) is V;
X(126) is F;
X(127) is P;
X(128) is L;
X(129) is A;
X(130) is P;
X(131) is C;
X(132) is S;
X(133) is R;
X(134) is S;
X(135) is T;
X(136) is S;
X(137) is E;
X(138) is S;
X(139) is T;
X(140) is A;
X(141) is A;
X(142) is L;
X(143) is G;
X(144) is C;
X(145) is L;
X(146) is V;
X(147) is K;
X(148) is D;
X(149) is Y;
X(150) is F;
X(151) is P;
X(152) is E;
X(153) is P;
X(154) is V;
X(155) is T;
X(156) is V;
X(157) is S;
X(158) is W;
X(159) is N;
X(160) is S;
X(161) is G;
X(162) is A;
X(163) is L;
X(164) is T;
X(165) is S;
X(166) is G;
X(167) is V;
X(168) is H;
X(169) is T;
X(170) is F;
X(171) is P;
X(172) is A;
X(173) is V;
X(174) is L;
X(175) is Q;
X(176) is S;
X(177) is S;
X(178) is G;
X(179) is L;
X(180) is Y;
X(181) is S;
X(182) is L;
X(183) is S;
X(184) is S;
X(185) is V;
X(186) is V;
X(187) is T;
X(188) is V;
X(189) is P;
X(190) is S;
X(191) is S;
X(192) is S;
X(193) is L;
X(194) is G;
X(195) is T;
X(196) is K;
X(197) is T;
X(198) is Y;
X(199) is T;
X(200) is C;
X(201) is N;
X(202) is V;
X(203) is D;
X(204) is H;
X(205) is K;
X(206) is P;
X(207) is S;
X(208) is N;
X(209) is T;
X(210) is K;
X(211) is V;
X(212) is D;
X(213) is K;
X(214) is R;
X(215) is V;
X(216) is E;
X(217) is S;
X(218) is K;
X(219) is Y;
X(220) is G;
X(221) is a bond;
X(222) is a bond;
X(223) is a bond;
X(224) is P;
X(225) is P;
X(226) is C;
X(227) is P;
X(228) is S;
X(229) is C;
X(230) is P;
X(231) is A;
X(232) is P;
X(233) is E;
X(234) is F;
X(235) is L;
X(236) is G;
X(237) is G;
X(238) is P;
X(239) is S;
X(240) is V;
X(241) is F;
X(242) is L;
X(243) is F;
X(244) is P;
X(245) is P;
X(246) is K;
X(247) is P;
X(248) is K;
X(249) is D;
X(250) is T;
X(251) is selected from the group consisting of L, D, E, H, and T;
X(252) is selected from the group consisting of M, D, E, and H;
X(253) is selected from the group consisting of I, D, E, F, H, K, L, N, P, Q, R, S, T, V, W, and Y;
X(254) is selected from the group consisting of S, E, K, N, P, Q, R, V, and W;
X(255) is R;
X(256) is selected from the group consisting of T, I, L, M, P, S, V, W, and Y;
X(257) is P;
X(258) is E;
X(259) is selected from the group consisting of V and T;
X(260) is T;
X(261) is C;
X(262) is V;
X(263) is V;
X(264) is V;
X(265) is D;
X(266) is V;
X(267) is S;
X(268) is Q;
X(269) is E;
X(270) is D;
X(271) is P;
X(272) is E;
X(273) is V;
X(274) is Q;
X(275) is F;
X(276) is N;
X(277) is W;
X(278) is selected from the group consisting of Y, D and E;
X(279) is selected from the group consisting of V, A, Q, T, and W;
X(280) is D;
X(281) is G;
X(282) is selected from the group consisting of V, F, G, I, L, Q, and W;
X(283) is E;
X(284) is V;
X(285) is selected from the group consisting of H, P, and T;
X(286) is N;
X(287) is A;
X(288) is K;
X(289) is T;
X(290) is K;
X(291) is P;
X(292) is R;
X(293) is E;
X(294) is E;
X(295) is Q;
X(296) is F;
X(297) is N;
X(298) is S;
X(299) is T;
X(300) is Y;
X(301) is selected from the group consisting of R, G, K, and Q;
X(302) is selected from the group consisting of V, A, E, H, K, Q, S, and T;
X(303) is selected from the group consisting of V, N, P, Q, R, and S;
X(304) is S;
X(305) is selected from the group consisting of V, G, P, and T;
X(306) is selected from the group consisting of L, F, H, I, N, T, V, and Y;
X(308) is selected from the group consisting of V, A, N, P, and S;
X(309) is selected from the group consisting of L, F, G, I, M, N, Q, S, T, V, W, and Y;
X(310) is H;
X(311) is selected from the group consisting of Q, D, E, G, P, T, and W;
X(312) is D;
X(313) is W;
X(314) is L;
X(315) is N;
X(316) is G;
X(317) is K;
X(318) is E;
X(319) is Y;
X(320) is K;
X(321) is C;
X(322) is K;
X(323) is V;
X(324) is S;
X(325) is N;
X(326) is K;
X(327) is G;
X(328) is L;
X(329) is P;
X(330) is S;
X(331) is S;
X(332) is I;
X(333) is E;
X(334) is K;
X(335) is T;
X(336) is I;
X(337) is S;
X(338) is K;
X(339) is A;
X(340) is K;
X(341) is G;
X(342) is Q;
X(343) is P;
X(344) is R;
X(345) is E;
X(346) is P;
X(347) is Q;
X(348) is V;
X(349) is Y;
X(350) is T;
X(351) is L;
X(352) is P;
X(353) is P;
X(354) is S;
X(355) is Q;
X(356) is E;
X(357) is E;
X(358) is M;
X(359) is T;
X(360) is K;
X(361) is N;
X(362) is Q;
X(363) is V;
X(364) is S;
X(365) is L;
X(366) is T;
X(367) is C;
X(368) is L;
X(369) is V;
X(370) is K;
X(371) is G;
X(372) is F;
X(373) is Y;
X(374) is P;
X(375) is S;
X(376) is D;
X(377) is I;
X(378) is A;
X(379) is V;
X(380) is E;
X(381) is W;
X(382) is E;
X(383) is S;
X(384) is N;
X(385) is G;
X(386) is Q;
X(387) is P;
X(388) is E;
X(389) is N;
X(390) is N;
X(391) is Y;
X(392) is K;
X(393) is T;
X(394) is T;
X(395) is P;
X(396) is P;
X(397) is V;
X(398) is L;
X(399) is D;
X(400) is S;
X(401) is D;
X(402) is G;
X(403) is S;
X(404) is selected from the group consisting of F, H, I, L, M, N, Q, T, and V;
X(405) is selected from the group consisting of F and W;
X(406) is selected from the group consisting of L, A, D, E, G, K, N, Q, S, T, and V;
X(407) is selected from the group consisting of Y and M;
X(408) is S;
X(409) is selected from the group consisting of R, G, Q, and S;
X(410) is selected from the group consisting of L, F, Q, and Y;
X(411) is T;
X(412) is selected from the group consisting of V and P;
X(413) is D;
X(414) is K;
X(415) is S;
X(416) is R;
X(417) is W;
X(418) is Q;
X(419) is E;
X(420) is G;
X(421) is N;
X(422) is V;
X(423) is F;
X(424) is S;
X(425) is C;
X(426) is S;
X(427) is V;
X(428) is M;
X(429) is H;
X(430) is E;
X(431) is A;
X(432) is selected from the group consisting of L, E and K;
X(433) is selected from the group consisting of H, D, G, P, S, T, and W;
X(434) is selected from the group consisting of N, D, E, G, H, S, T, and W;
X(435) is selected from the group consisting of H, G, K, M, N, P, S, T, and V;
X(436) is Y;
X(437) is selected from the group consisting of T, D, E, G, H, K, N, Q, and S;
X(438) is selected from the group consisting of Q, G, P, S, and T; and
X(439) is K;
X(440) is selected from the group consisting of S, D, E, G, H, K, N, P, Q, R, and T;
X(441) is L;
X(442) is S;
X(443) is L;
X(444) is S;
X(445) is L;
X(446) is G; and
X(447) is K;
said non-naturally occurring protein having reduced immunogenicity as compared with a protein comprising SEQ ID NO:4.

14. A non-naturally occurring protein comprising a variant Fc region comprising at least one amino acid modification of SEQ ID NO:4, said modification at a position selected from the group consisting of positions 251, 252, 253, 254, 256, 259, 278, 279, 282, 283, 285, 300, 301, 302, 303, 305, 306, 308, 309, 311, 404, 405, 406, 407, 409, 410, 412, 432, 433, 434, 435, 437, 438, and 440; and, wherein said modification at position 251 is selected from the group consisting of D, E, H, and T; wherein said modification at position 252 is selected from the group consisting of D, E, and H; wherein said modification at position 253 is selected from the group consisting of D, E, F, H, K, L, N, P, Q, R, S, T, V, W, and Y; wherein said modification at position 254 is selected from the group consisting of E, K, N, P, Q, R, V, and W; wherein said modification at position 256 is selected from the group consisting of I, L, M, P, S, V, W, and Y; wherein the modification at position 259 is T; wherein said modification at position 278 is selected from the group consisting of D and E; wherein said modification at position 279 is selected from the group consisting of A, Q, T, and W; wherein said modification at position 282 is selected from the group consisting of F, G, I, L, P, Q, W, and Y; wherein the modification at position 283 is G; wherein said modification at position 285 is selected from the group consisting of E, P, and T; wherein said modification at position 300 is selected from the group consisting of A, D, E, G, H, K, M, N, P, Q, R, S, T, and V; wherein said modification at position 301 is selected from the group consisting of D, E, G, K, and Q; wherein said modification at position 302 is selected from the group consisting of A, E, H, K, Q, S, and T; wherein said modification at position 303 is selected from the group consisting of D, E, N, P, of R, and S; wherein said modification at position 305 is selected from the group consisting of G, P, and T; wherein said modification at position 306 is selected from the group consisting of F, H, I, N, T, V, and Y; wherein said modification at position 308 is selected from the group consisting of A, N, P, and S; wherein said modification at position 309 is selected from the group consisting of F, G, I, M, N, O, S, T, V, W, and Y; wherein said modification at position 311 is selected from the group consisting of D, E, G, P, T, and W; wherein said modification at position 404 is selected from the group consisting of H, I, L, M, N, Q, T, and V; wherein the modification at position 405 is W; wherein said modification at position 406 is selected from the group consisting of A, D, E, G, K, N, Q, S, T, and V; wherein the modification at position 407 is M; wherein said modification at position 409 is selected from the group consisting of G, Q, and S; wherein said modification at position 410 is selected from the group consisting of F, Q, and Y; wherein the modification at position 412 is P; wherein said modification at position 432 is selected from the group consisting of E and K; wherein said modification at position 433 is selected from the group consisting of D, G, P, S, T, and W; wherein said modification at position 434 is selected from the group consisting of D, E, G, H, S, T, and W; wherein said modification at position 435 is selected from the group consisting of G, K, M, N, P, S, T, and V; wherein said modification at position 437 is selected from the group consisting of D, E, G, H, K, N, Q, and S; wherein said modification at position 438 is selected from the group consisting of G, P, S, and T; and, wherein said modification at position 440 is selected from the group consisting of D, E, G, H, K, N, P, Q, R, and T, said non-naturally occurring protein having reduced immunogenicity as compared with a protein comprising SEQ ID NO:4.

15. The non-naturally occurring protein of claim 14, wherein at least one modification is made to the group consisting of positions 251, 252, 253, 254, 256, 259, 278, 279, 282, 283, 285, 300, 301, 302, 303, 305, 306, 308, 309, 311, 404, 405, 406, 407, 409, 410, 412, 432, 433, 434, 435, 437, 438, and 440; and, wherein said modification at position 251 is selected from the group consisting of D, E, H, and T; wherein the modification at position 252 is D; wherein said modification at position 253 is selected from the group consisting of D and E; wherein said modification at position 256 is selected from the group consisting of M, W, and Y; wherein the modification at position 278 is D; wherein said modification at position 282 is selected from the group consisting of F, G, L, Q, W, and Y; wherein said modification at position 300 is selected from the group consisting of A, D, E, G, H, K, N, P, Q, R, S, and T; wherein the modification at position 301 is D; wherein said modification at position 303 is selected from the group consisting of D, E, N, P, Q, R, and S; wherein the modification at position 311 is D; wherein said modification at position 404 is selected from the group consisting of H, N, Q, and T; wherein said modification at position 432 is selected from the group consisting of E and K; and, wherein the modification at position 437 is E.

16. The non-naturally occurring protein of claim 14 wherein at least one modification is made to the group consisting of Agretope 16 (251-259), Agretope 17b (262-270), Agretope 18 (277-285), Agretope 19a (300-308), Agretope 20a (302-310), Agretope 21a (303-311), Agretope 22b (348-356), Agretope 23 (369-377), Agretope 24b (404-412), Agretope 25b (406-414), Agretope 26 (407-415), Agretope 27a (422-430), and Agretope 28a (432-440).
